(19) United States
(12) Patent Application Publication
(10) Pub. No.: US 2022/0380805 A1
(43) Pub. Date: Dec. 1, 2022

(54) ARENAVIRUSES AS VECTORS

(71) Applicant: UNIVERSITÄT BASEL, Basel (CH)

(72) Inventors: Daniel PINSCHEWER, Binningen (CH); Weldi Bonilla PINSCHEWER, Binningen (CH)

(21) Appl. No.: 17/772,996

(22) PCT Filed: Nov. 6, 2020
(86) PCT No.: PCT/EP2020/081393

§ 371 Date: Apr. 28, 2022

Related U.S. Application Data
(60) Provisional application No. 62/932,214, filed on Nov. 7, 2019.

(51) Int. Cl. C12N 15/86; A61K 39/12

(52) U.S. Cl. CPC C12N 15/86; A61K 39/12; C12N 2760/10034; A61K 2039/51

(57) ABSTRACT

The present application relates to arenavirus particles containing a genome engineered such that an arenaviral open reading frame (“ORF”) is sequestered into two or more functional fragments and these fragments are expressed from two or more viral mRNA transcripts. The arenavirus particles described herein are genetically stable and provide high-level transgene expression. In certain embodiments, the arenavirus particles are tri-segmented. In particular, described herein is a nucleotide sequence comprising one or more ORFs comprising a nucleotide sequence encoding a functional fragment of arenavirus GP, NP, L or Z. Also described herein is an arenavirus particle containing a genome engineered such that an arenaviral ORF is sequestered into two or more functional fragments and these fragments are expressed from two or more viral mRNA transcripts. Also described herein is an arenavirus genomic or antigenomic segment engineered such that the transcription thereof results in one or more mRNA transcripts comprising a nucleotide sequence encoding a functional fragment of arenavirus GP, NP, L or Z. The arenavirus particles described herein may be suitable for vaccines and/or treatment of diseases and/or for the use in immunotherapies.

[0001] This application claims benefit of U.S. Provisional Patent Application No. 62/932,214, filed Nov. 7, 2019, the disclosure of which is incorporated by reference herein in its entirety.

### REFERENCE TO SEQUENCE LISTING SUBMITTED ELECTRONICALLY

[0002] This application incorporates by reference a Sequence Listing submitted with this application as text file entitled “Sequence_Listing_13194-050-228.TXT” created on Nov. 5, 2020 and having a size of 701,226 bytes.

### 1. INTRODUCTION

[0003] The present application relates to arenavirus particles engineered such that an arenaviral open reading frame (“ORF”) is separated over two or more mRNA transcripts. The arenavirus particles described herein are genetically stable and provide high-level transgene expression. In certain embodiments, the arenavirus particles are tri-segmented. In particular, described herein is a nucleotide sequence comprising one or more ORFs comprising a nucleotide sequence encoding a functional fragment of arenavirus GP, NP, L or Z. Also described herein is an arenavirus particle engineered such that an arenaviral ORF is separated over two or more mRNA transcripts. Also described herein is an arenavirus genomic or antigenomic segment engineered such that the transcription thereof results in one or more mRNA transcripts comprising a nucleotide sequence encoding a functional fragment of arenavirus GP, NP, L or Z. The arenavirus particles described herein may be suitable for vaccines and/or treatment of diseases and/or for the use in immunotherapies.

### 2. BACKGROUND

### 2.1 Replicating Viral Vector Systems

[0004] Replicating viral vector systems are optimally suited for delivering a target antigen of choice with the aim of inducing a potent immune response against it. In particular, viral vector systems are useful when aiming to elicit strong CD8+ T cell responses such as in tumor immunotherapy or with the intent of curing a persistent viral infection. To serve as a viral delivery system, wild-type viruses can be re-engineered to incorporate transgenic sequences, allowing them to induce immune responses against the respective translation production, i.e., the target of choice. Additionally, when based on viruses with a (known or insufficiently defined) disease-causing potential, re-engineering should confer the resulting vector with a defined degree of attenuation. On the other hand, immunogenicity of virally vectored delivery systems commonly depends on the vector dose administered. Accordingly, attenuation should not reduce viral growth in tissue culture systems to the point of rendering industrial production impractical. The usefulness of a replication-competent vector system for medical use therefore depends substantially on the following criteria:

[0005] 1) good growth in cell culture, enabling the vector's production to high titers in industrial fermentation processes (production yields),

[0006] 2) stable attenuation, i.e., the inability of the vector to revert to wild-type-like (more virulent) replication behavior in the vaccinated host (genetic stability),

[0007] 3) high-level transgene expression to elicit strong immune responses against the desired target antigen(s) (transgene expression levels).

[0008] Arenaviruses such as lymphocytic choriomeningitis virus (LCMV) and Pichinde virus (PICV) have been re-engineered to serve as replicating yet attenuated delivery systems inducing immune responses against incorporated heterologous antigens (Cheng B Y, et al. (2015) J Virol 89, 7373-7384; Dhanwani R, et al. (2015) J Virol 90, 2551-2560; Emonet S F, et al. (2009) Proc Natl Acad Sci USA 106, 3473-3478; Kallert S M, et al. (2017) Nat Commun 8, 15327; Popkin D L, et al. (2011) J Virol 85, 7928-7932). The natural arenavirus genome consists of two RNA segments and contains open reading frames (ORFs) encoding for the glycoprotein and nucleoprotein, both encoded on the short (S) segment, as well as the polymerase L and matrix protein Z, which are encoded on the large (L) segment (FIG. 1A). In order to incorporate foreign transgenic sequences in addition to the four arenaviral ORFs, the S segment can be duplicated and the GP and NP ORFs of arenaviruses can be sequestered onto the resulting two S segments (S_{NP}, S_{GP}; FIGS. 1B-E; (Cheng B Y, et al. (2015) J Virol 89, 7373-7384; Emonet S F, et al. (2009) Proc Natl Acad Sci USA 106, 3473-3478; Kallert S M, et al. (2017) Nat Commun 8, 15327). The concept behind segregating NP and GP onto separate S segments is to force the virus to carry three genomic RNA segments in order to maintain its complete proteome. By consequence, there are four possibilities how to position NP, GP and two heterologous ORFs (designated as “h.p.” in FIGS. 1B-1G) on the two segments. These four possibilities here are referred to as r3LCMV, artLCMV, r3LCMVrev and artLCMVrev (FIGS. 1B-E). It has been demonstrated that r3LCMVrev and artLCMVrev grow to only very poor titers, much lower than r3LCMV or artLCMV (Cheng B Y, et al. (2015) J Virol 89, 7373-7384), and thus fail to meet the above criterion 1. Poor growth of r3LCMVrev and artLCMVrev supposedly results from NP being positioned next to the 5′ untranslated region (UTR), and thus being expressed under control of the respective (weaker) viral promoter sequences. Accordingly, the r3LCMVrev and artLCMVrev designs are not well suited for industrial production. Kallert et al. (Kallert S M, et al. (2017) Nat Commun 8, 15327) have further demonstrated that r3LCMV is genetically unstable: During infection of immunodeficient mice, r3LCMV underwent inter-segmental RNA recombination yielding a bi-segmented virus, which had reunited the NP and GP ORFs on one RNA segment. The resulting virus had lost (most of) its transgenes and no longer was attenuated (FIG. 1F), thus failed to meet the above criterion 2 owing to safety concerns. In summary, neither r3LCMV nor r3LCMVrev met all three criteria (production yields, genetic stability, transgene expression levels; FIG. 2). In contrast artLCMV was genetically stable even after prolonged periods of replication in immunodeficient animals. The underlying mechanistic explanation was that the NP and GP ORFs in artLCMV could hypothetically be recombined on one S segment (FIG. 1G), but such recombination could only occur at the expense of losing the 5′ UTR while duplicating the 3′ UTR on both ends of the resulting S segment. The 5′ UTR and the 3′ UTR are known to form a non-covalent panhandle structure by RNA base-pairing, which allows template recognition by the viral RNA-dependent RNA polymerase (RdRp) in both a sequence- and structure-dependent manner. Accordingly, biological activity requires a precise 5′ UTR and 3′ UTR, tolerating no deviation from the natural sequence (Perez and de la Torre (2003) J Virol 77, 1184-1194). Accordingly, a hypothetical recombination product as depicted in FIG. 1G could not serve as a template for recognition by the viral RdRp and would be biologically inactive. artLCMV not only is genetically stable but also grows well in cell culture (Cheng B Y, et al. (2015) J Virol 89, 7373-7384; Kallert S M, et al. (2017) Nat Commun 8, 15327; Popkin D L, et al. (2011) J Virol 85, 7928-7932). artLCMV therefore was the only tri-segmented arenavirus design amongst the four strategies outlined in FIGS. 1B-IE, which met the specifications 1 and 2 above, i.e. good production yields and genetic stability ensuring safety.

### 2.2 Glycoprotein and Precursors Thereof

[0009] The GP open reading frame encodes three functional protein subunits, which are expressed as one ribosomal translation product. During insertion of the nascending polypeptide into the endoplasmic reticulum (ER) the signal peptide is cleaved off from the subsequent GP1 domain by the signal peptidase (FIG. 3A). The remainder GP1-GP2 sequence is membrane-inserted and it is post-translationally cleaved into GP1 and GP2 subunits by the subtilisin kexin isozyme-1 (SKI-1)/site 1 protease (S1P, FIG. 3A) but the GP1 and GP2 domains remain non-covalently associated in the mature glycoprotein complex. Especially noteworthy is the essential nature of the arenavirus GP signal peptide (SP): Unlike most signal peptides which are approximately 20 amino acids in length and are rapidly degraded after signal peptidase cleavage, the arenavirus glycoprotein SPs typically are >50 amino acids long (Eichler R, et al. (2003) FEBS Lett 538, 203-206) and serve not only to insert the GP protein into the ER but they remain associated with the GP1/GP2 complex and are incorporated into mature virions. Furthermore, the arenavirus glycoprotein SP plays an essential role in the post-translational proteolytic cleavage of GP1 from GP2 by SKI-1/SIP. When the arenavirus SP was substituted for a foreign signal peptide in transient transfection experiments, the GP1/GP2 sequence was inserted into the ER, but it failed to undergo processing by SKI-1/SIP (Agnihothram, S S, et al. (2006) J Virol 80, 5189-5198; Eichler R, et al. (2003) EMBO Rep 4, 1084-1088; Schrempf S, et al. (2007) J Virol 81, 12515-12524). GP1/GP2 cleavage by SKI-1/SIP is, however, essential for rendering the glycoprotein complex biologically active (Pinschewer, D D, et al. (2003) Proc Natl Acad Sci USA 100, 7895-7900).

### 2.3 Engineered Arenavirus Particles and Arenavirus Genomic Segments

[0010] Recently, it has been shown that an infectious arenavirus particle can be engineered to contain a genome with the ability to amplify and express its genetic material in infected cells but unable to produce further progeny in normal, not genetically engineered cells (i.e., an infectious, replication-deficient arenavirus particle) (International Publication Nos.: WO 2009/083210 A1, WO 2014/140301 A1 and WO 2015/082570 A1). It has also been shown that a modified arenavirus genomic segment can be engineered to carry a viral ORF in a position other than the wild-type position of the ORF (International Publication No.: WO 2016/075250 A1 and Publication No.: US 2017/0319673 A1). It has further been shown that a modified Pichinde virus genomic segment can be engineered to carry a viral ORF in a position other than the wild-type position of the ORF (International Publication No.: WO 2017/198726 A1 and Publication No.: US 2019/0135875 A1).

[0011] There is an urgent need for compositions, such as the engineered arenavirus particles and related compositions, to be used in vaccines and immunotherapies of various diseases.

### 3. SUMMARY OF THE INVENTION

[0012] Provided herein are nucleotide sequences, arenavirus particles, arenavirus genomic or antigenomic segments, and related compositions. Also provided herein are methods of generating an arenavirus genomic or antigenomic RNA segment, methods of generating an arenavirus particle, and methods of rescuing an arenavirus particle from cDNA or RNA.

### 3.1 Nucleotide Sequences and Related Compositions and Methods

[0013] In one aspect, provided herein are nucleotide sequences. In certain embodiments, provided herein is a nucleotide sequence comprising a first open reading frame (ORF) and a second ORF, wherein one of the two ORFs is in sense orientation and the other ORF is in antisense orientation;

wherein the first ORF comprises a nucleotide sequence encoding a functional fragment of a first polypeptide, and the first ORF does not encode the full-length first polypeptide;
wherein the second ORF comprises a nucleotide sequence encoding:
[0014] a) a second polypeptide; or
[0015] b) a functional fragment of the first polypeptide, and the second ORF does not encode the full-length first polypeptide; or
[0016] c) a functional fragment of a second polypeptide, and the second ORF does not encode the full-length second polypeptide; or
[0017] d) a heterologous non-arenaviral polypeptide; and
   wherein the first and second polypeptides are different from each other and selected from the group consisting of arenavirus GP, NP, Z and L.

[0018] In certain embodiments, the first ORF and the second ORF are separated by an arenavirus intergenic region (IGR) and each ORF is under control of an arenavirus 3′ untranslated region (UTR) or an arenavirus 5′ UTR.

[0019] In certain embodiments, the first ORF further comprises a nucleotide sequence encoding a second heterologous non-arenaviral polypeptide or a third polypeptide; wherein the third polypeptide is different from the first polypeptide and second polypeptide and is selected from the group consisting of arenavirus GP, NP, Z and L; and wherein the heterologous non-arenaviral polypeptide and the second heterologous non-arenaviral polypeptide are the same or different from each other.

[0020] In certain embodiments, the second ORF further comprises a nucleotide sequence encoding a second heterologous non-arenaviral polypeptide or a third polypeptide; wherein the third polypeptide is different from the first polypeptide and second polypeptide and is selected from the group consisting of arenavirus GP, NP, Z and L; and wherein the heterologous non-arenaviral polypeptide and the second heterologous non-arenaviral polypeptide are the same or different from each other.

[0021] In certain embodiments, the first ORF is part of a transcription unit that further comprises another ORF, wherein the other ORF and the first ORF are separated by an internal ribosome entry site (IRES). In certain embodiments, the second ORF is part of a transcription unit that further comprises another ORF, wherein the other ORF and the second ORF are separated by an IRES. In certain embodiments, the first ORF and/or the second ORF comprises a nucleotide sequence encoding an arenavirus GP signal peptide or a functional fragment thereof and the other ORF comprises a nucleotide sequence encoding a heterologous non-arenaviral polypeptide or an arenavirus NP, Z, or L.

[0022] In certain embodiments, the arenavirus GP, NP, Z and L are from LCMV, Lassa virus, Pichinde virus, Oliveros virus, Tamiami virus, Mobala virus, Mopeia virus, Ippy virus, Amapari virus, Flexal virus, Guanarito virus, Latino virus, Machupo virus, Parana virus, Pirital virus, Sabia virus, Tacaribe virus, Bear Canyon virus, Whitewater Arroyo virus, Allpahuayo virus (ALLV), Alxa virus, Chapare virus, Lijiang virus, Cupixi virus, Gairo virus, Loei River virus, Lujo virus, Luna virus, Luli virus, Lunk virus, Mariental virus, Merino Walk virus, Morogoro virus, Okahandja virus, Aporé virus, Ryukyu virus, Solwezi virus, souris virus, Wenzhou virus, Big Brushy Tank virus, Catarina virus, Skinner Tank virus, Tonto Creek virus, Xapuri virus, or Junin virus.

[0023] In certain embodiments, provided herein is a nucleotide sequence comprising an open reading frame (ORF), wherein the ORF comprises a nucleotide sequence encoding
[0024] a) a functional fragment of a first polypeptide, and
[0025] b) a heterologous non-arenaviral polypeptide or a second polypeptide; wherein the ORF does not encode the full-length first polypeptide; and wherein the first and second polypeptides are different from each other and selected from the group consisting of arenavirus GP, NP, Z and L that are not from Lassa virus. In certain embodiments, the first and second polypeptides are selected from the group consisting of arenavirus GP, NP, Z and L of LCMV, Pichinde virus, Oliveros virus, Tamiami virus, Mobala virus, Mopeia virus, Ippy virus, Amapari virus, Flexal virus, Guanarito virus, Latino virus, Machupo virus, Parana virus, Pirital virus, Sabia virus, Tacaribe virus, Bear Canyon virus, Whitewater Arroyo virus, Allpahuayo virus (ALLV), Alxa virus, Chapare virus, Lijiang virus, Cupixi virus, Gairo virus, Loei River virus, Lujo virus, Luna virus, Luli virus, Lunk virus, Mariental virus, Merino Walk virus, Morogoro virus, Okahandja virus, Aporé virus, Ryukyu virus, Solwezi virus, souris virus, Wenzhou virus, Big Brushy Tank virus, Catarina virus, Skinner Tank virus, Tonto Creek virus, Xapuri virus, or Junin virus.

[0026] In certain embodiments, the ORF is a first ORF and the nucleotide sequence further comprises a second ORF. In certain embodiments, the second ORF comprises a nucleotide sequence encoding a third polypeptide, a functional fragment of the first polypeptide, a functional fragment of a third polypeptide, or a second heterologous non-arenaviral polypeptide; wherein the third polypeptide is different from the first polypeptide and the second polypeptide and selected from the group consisting of arenavirus GP, NP, Z and L; wherein one of the two ORFs is in sense orientation and the other ORF is in antisense orientation; wherein the second ORF does not encode the full-length first polypeptide; wherein the second ORF does not encode the full-length third polypeptide; and wherein the heterologous non-arenaviral polypeptide and the second heterologous non-arenaviral polypeptide are the same or different from each other. In certain embodiments, the second ORF comprises a nucleotide sequence encoding a functional fragment of a first polypeptide, and wherein the functional fragment encoded by the first ORF is different from the functional fragment encoded by the second ORF.

[0027] In certain embodiments, the nucleotide sequence does not further comprise a second ORF.

[0028] In certain embodiments, the nucleotide sequence is an arenavirus genomic or antigenomic S segment. In certain embodiments, the nucleotide sequence is an arenavirus genomic or antigenomic L segment.

[0029] In certain embodiments, the first ORF is under control of an arenavirus 3′ UTR, and the second ORF is under control of an arenavirus 5′ UTR. In certain embodiments, the first ORF is under control of an arenavirus 5′ UTR, and the second ORF is under control of an arenavirus 3′ UTR.

[0030] In certain embodiments, the first ORF comprises a nucleotide sequence encoding arenavirus GP signal peptide, either alone or fused to a heterologous non-arenaviral polypeptide. In certain embodiments, the second ORF comprises a nucleotide sequence encoding a heterologous non-arenaviral signal peptide and the arenavirus GP1 and GP2. In certain embodiments, the second ORF comprises a nucleotide sequence encoding a heterologous non-arenaviral polypeptide; wherein the heterologous non-arenaviral polypeptide encoded by the first ORF and the heterologous non-arenaviral polypeptide encoded by the second ORF are the same or different from each other. In certain embodiments, the first ORF is under control of an arenavirus 3′ UTR and the second ORF is under control of an arenavirus 5′ UTR.

[0031] In certain embodiments, the first ORF comprises a nucleotide sequence encoding a heterologous non-arenaviral signal peptide and the arenavirus GP1 and GP2. In certain embodiments, the second ORF comprises a nucleotide sequence encoding NP. In certain embodiments, the first ORF is under control of an arenavirus 5′ UTR and the second ORF is under control of an arenavirus 3′ UTR.

[0032] In certain embodiments, the first polypeptide comprises an amino acid sequence that is at least 80%, 85%, 90%, 95%, 96%, 97%, 98%, 99% or 100% identical to the amino acid sequence of SEQ ID NO:1, SEQ ID NO:2, SEQ ID NO:3, SEQ ID NO:4, SEQ ID NO:5, SEQ ID NO:6, SEQ ID NO:7, SEQ ID NO:8, SEQ ID NO:9, SEQ ID NO:10, SEQ ID NO: 11, SEQ ID NO:12, SEQ ID NO:13, SEQ ID NO:14, SEQ ID NO:15, SEQ ID NO:16, SEQ ID NO:17, SEQ ID NO:18, SEQ ID NO:19, SEQ ID NO:20, SEQ ID NO:21, SEQ ID NO:22, SEQ ID NO:23, SEQ ID NO:24, SEQ ID NO:48, SEQ ID NO:52, SEQ ID NO:59, SEQ ID NO:66, SEQ ID NO:73, SEQ ID NO:80, SEQ ID NO:84, SEQ ID NO:91, SEQ ID NO:98, SEQ ID NO:105, SEQ ID NO:109, SEQ ID NO:113, SEQ ID NO:120, SEQ ID NO:127, SEQ ID NO:134, SEQ ID NO:49, SEQ ID NO:56, SEQ ID NO:63, SEQ ID NO:70, SEQ ID NO:77, SEQ ID NO:81, SEQ ID NO:88, SEQ ID NO:95, SEQ ID NO:102, SEQ ID NO:106, SEQ ID NO:110, SEQ ID NO:117, SEQ ID NO:124, SEQ ID NO:131, SEQ ID NO:138, SEQ ID NO:50, SEQ ID NO:57, SEQ ID NO:64, SEQ ID NO:71, SEQ ID NO:78, SEQ ID NO:82, SEQ ID NO:89, SEQ ID NO:96, SEQ ID NO:103, SEQ ID NO:107, SEQ ID NO:111, SEQ ID NO: 118, SEQ ID NO:125, SEQ ID NO:132, SEQ ID NO:139, SEQ ID NO:51, SEQ ID NO:58, SEQ ID NO:65, SEQ ID NO:72, SEQ ID NO:79, SEQ ID NO:83, SEQ ID NO:90, SEQ ID NO:97, SEQ ID NO:104, SEQ ID NO:108, SEQ ID NO:112, SEQ ID NO: 119, SEQ ID NO:126, SEQ ID NO:133, Or SEQ ID NO:140; and the second polypeptide comprises an amino acid sequence that is at least 80%, 85%, 90%, 95%, 96%, 97%, 98%, 99% or 100% identical to the amino acid sequence of SEQ ID NO:1, SEQ ID NO:2, SEQ ID NO:3, SEQ ID NO:4, SEQ ID NO:5, SEQ ID NO:6, SEQ ID NO:7, SEQ ID NO:8, SEQ ID NO:9, SEQ ID NO:10, SEQ ID NO:11, SEQ ID NO:12, SEQ ID NO:13, SEQ ID NO:14, SEQ ID NO:15, SEQ ID NO:16, SEQ ID NO:17, SEQ ID NO:18, SEQ ID NO:19, SEQ ID NO:20, SEQ ID NO:21, SEQ ID NO:22, SEQ ID NO:23, SEQ ID NO:24, SEQ ID NO:48, SEQ ID NO:52, SEQ ID NO:59, SEQ ID NO:66, SEQ ID NO:73, SEQ ID NO:80, SEQ ID NO:84, SEQ ID NO:91, SEQ ID NO:98, SEQ ID NO:105, SEQ ID NO:109, SEQ ID NO:113, SEQ ID NO:120, SEQ ID NO:127, SEQ ID NO:134, SEQ ID NO:49, SEQ ID NO:56, SEQ ID NO:63, SEQ ID NO:70, SEQ ID NO:77, SEQ ID NO:81, SEQ ID NO:88, SEQ ID NO:95, SEQ ID NO:102, SEQ ID NO:106, SEQ ID NO:110, SEQ ID NO: 117, SEQ ID NO:124, SEQ ID NO:131, SEQ ID NO:138, SEQ ID NO:50, SEQ ID NO:57, SEQ ID NO:64, SEQ ID NO:71, SEQ ID NO:78, SEQ ID NO:82, SEQ ID NO:89, SEQ ID NO:96, SEQ ID NO:103, SEQ ID NO:107, SEQ ID NO:111, SEQ ID NO: 118, SEQ ID NO:125, SEQ ID NO:132, SEQ ID NO:139, SEQ ID NO:51, SEQ ID NO:58, SEQ ID NO:65, SEQ ID NO:72, SEQ ID NO:79, SEQ ID NO:83, SEQ ID NO:90, SEQ ID NO:97, SEQ ID NO:104, SEQ ID NO:108, SEQ ID NO: 112, SEQ ID NO: 119, SEQ ID NO:126, SEQ ID NO:133, or SEQ ID NO:140; and the third polypeptide comprises an amino acid sequence that is at least 80%, 85%, 90%, 95%, 96%, 97%, 98%, 99% or 100% identical to the amino acid sequence of SEQ ID NO:1, SEQ ID NO:2, SEQ ID NO:3, SEQ ID NO:4, SEQ ID NO:5, SEQ ID NO:6, SEQ ID NO:7, SEQ ID NO:8, SEQ ID NO:9, SEQ ID NO:10, SEQ ID NO: 11, SEQ ID NO:12, SEQ ID NO:13, SEQ ID NO:14, SEQ ID NO:15, SEQ ID NO:16, SEQ ID NO:17, SEQ ID NO:18, SEQ ID NO:19, SEQ ID NO:20, SEQ ID NO:21, SEQ ID NO:22, SEQ ID NO:23, SEQ ID NO:24, SEQ ID NO:48, SEQ ID NO:52, SEQ ID NO:59, SEQ ID NO:66, SEQ ID NO:73, SEQ ID NO:80, SEQ ID NO:84, SEQ ID NO:91, SEQ ID NO:98, SEQ ID NO:105, SEQ ID NO:109, SEQ ID NO: 113, SEQ ID NO:120, SEQ ID NO:127, SEQ ID NO:134, SEQ ID NO:49, SEQ ID NO:56, SEQ ID NO:63, SEQ ID NO:70, SEQ ID NO:77, SEQ ID NO:81, SEQ ID NO:88, SEQ ID NO:95, SEQ ID NO:102, SEQ ID NO:106, SEQ ID NO:110, SEQ ID NO: 117, SEQ ID NO:124, SEQ ID NO:131, SEQ ID NO:138, SEQ ID NO:50, SEQ ID NO:57, SEQ ID NO:64, SEQ ID NO:71, SEQ ID NO:78, SEQ ID NO:82, SEQ ID NO:89, SEQ ID NO:96, SEQ ID NO:103, SEQ ID NO:107, SEQ ID NO:111, SEQ ID NO: 118, SEQ ID NO:125, SEQ ID NO:132, SEQ ID NO:139, SEQ ID NO:51, SEQ ID NO:58, SEQ ID NO:65, SEQ ID NO:72, SEQ ID NO:79, SEQ ID NO:83, SEQ ID NO:90, SEQ ID NO:97, SEQ ID NO:104, SEQ ID NO:108, SEQ ID NO: 112, SEQ ID NO: 119, SEQ ID NO:126, SEQ ID NO:133, or SEQ ID NO:140. In certain embodiments, the first polypeptide comprises an amino acid sequence identical to SEQ ID NO:1, SEQ ID NO:2, SEQ ID NO:3, SEQ ID NO:4, SEQ ID NO:5, SEQ ID NO:6, SEQ ID NO:48, SEQ ID NO:52, SEQ ID NO:59, SEQ ID NO:66, SEQ ID NO:73, SEQ ID NO:80, SEQ ID NO:84, SEQ ID NO:91, SEQ ID NO:98, SEQ ID NO:105, SEQ ID NO:109, SEQ ID NO:113, SEQ ID NO:120, SEQ ID NO:127, or SEQ ID NO:134.

[0033] In certain embodiments, the functional fragment of the first polypeptide comprises an amino acid sequence that is at least 80%, 85%, 90%, 95%, 96%, 97%, 98%, 99% or 100% identical to the amino acid sequence of SEQ ID NO:25, SEQ ID NO:26, SEQ ID NO:27, SEQ ID NO:28, SEQ ID NO:29, SEQ ID NO:30, SEQ ID NO:31, SEQ ID NO:32, SEQ ID NO:33, SEQ ID NO:142, SEQ ID NO:34, SEQ ID NO:35, SEQ ID NO:36, SEQ ID NO:37, SEQ ID NO:38, SEQ ID NO:39, SEQ ID NO:40, SEQ ID NO:41, SEQ ID NO:42, SEQ ID NO:53, SEQ ID NO:60, SEQ ID NO:67, SEQ ID NO:74, SEQ ID NO:85, SEQ ID NO:92, SEQ ID NO:99, SEQ ID NO: 114, SEQ ID NO:121, SEQ ID NO:128, SEQ ID NO:135, SEQ ID NO:54, SEQ ID NO:61, SEQ ID NO:68, SEQ ID NO:75, SEQ ID NO:86, SEQ ID NO:93, SEQ ID NO:100, SEQ ID NO: 115, SEQ ID NO:122, SEQ ID NO:129, SEQ ID NO:136, SEQ ID NO:55, SEQ ID NO:62, SEQ ID NO:69, SEQ ID NO:76, SEQ ID NO:87, SEQ ID NO:94, SEQ ID NO:101, SEQ ID NO: 116, SEQ ID NO:123, SEQ ID NO:130, or SEQ ID NO:137.

[0034] In certain embodiments, the functional fragment encoded by the first ORF or the second ORF is an arenavirus GP signal peptide or a functional fragment thereof.

[0035] In certain embodiments, the heterologous non-arenaviral polypeptide, the second heterologous non-arenaviral polypeptide, or both heterologous non-arenaviral polypeptides are each an antigen derived from an infectious organism, tumor, or allergen. In certain embodiments, the antigen is selected from the group consisting of

(a) viral antigens, and the viral antigen is from a virus family selected from the group consisting of adenoviridae, herpesviridae, leviviridae, orthomyxoviridae, parvoviridae, filoviridae, hantaviridae, poxviridae, papillomaviridae, polyomaviridae, paramyxoviridae, pneumoviridae, picornaviridae, reoviridae, retroviridae, flaviviridae, hepadnaviridae, togaviridae, rhabdoviridae, arenaviridae, and coronaviridae;
(b) bacterial antigens, and the bacterial antigen is from a bacteria family selected from the group consisting of Aquaspirillum family, Azospirillum family, Azotobacteraceae family, Bacteroidaceae family, Bartonellaceae family, Bdellovibrio family, Campylobacteraceae family, Chlamydiaceae family, Clostridiaceae family, Enterobacteriaceae family, Gardinella family, Pasteurellaceae family, Halobacteriaceae family, Helicobacter family, Legionallaceae family, Listeriaceae family, Methylococcaceae family, mycobacteriaceae, Neisseriaceae family, Oceanospirillum family, Pasteurellaceae family, Streptococcaceae family, Pseudomonadaceae family, Rhizobiaceae family, Spirillum family, Spirosomaceae family, Staphylococcaceae family, Helicobacter family, Yersinia family, Bacillus antracis and Vampirovibrio family, and
(c) tumor neoantigens or neo-epitopes and tumor associated antigens; and the tumor associated antigen is selected from the group consisting of artificial fusion protein of HPV 16 E7 and E6 proteins, oncogenic viral antigens, cancer-testis antigens, oncofetal antigens, tissue differentiation antigens, mutant protein antigens, Adipophilin, AIM-2, ALDHIAI, BCLX (L), BING-4, CALCA, CD45, CPSF, cyclin DI, DKKI, ENAH (hMcna), Ga733 (EpCAM), EphA3, EZH2, FGF5, glypican-3, G250/MN/CAIX, HER-2/neu, IDOI, IGF2B3, IL13Ralpha2, Intestinal carboxyl esterase, alphafoetoprotein, Kallikrein 4, KIF20A, Lengsin, M-CSF, MCSP, mdm-2, Meloe, MMP-2, MMP-7, MUCl, MUC5AC, p53 (non-mutant), PAX5, PBF, PRAME, PSMA, RAGE, RAGE-I, RGS5, RhoC, RNF43, RU2AS, secernin 1, SOX10, STEAPI (six-transmembrane epithelial antigen of the prostate 1), survivin, Telomerase, VEGF, WT1, EGF-R, CEA, CD20, CD33, CD52, MELANA/MART1, MART2, NY-ESO-1, p53, MAGE Al, MAGE A3, MAGE-4, MAGE-5, MAGE-6, CDK4, alpha-actinin-4, ARTC1, BCR-ABL, BCR-ABL fusion protein (b3a2), B-RAF, CASP-5, CASP-8, beta-catenin, Cdc27, CDK4, CDKN2A, CLPP, COA-1, dek-can fusion protein, EFTUD2, Elongation factor 2, ETV6-AML, ETV6-AML1 fusion protein, FLT3-ITD, FNl, GPNMB, LDLR-fucosyltransferase fusion protein, NFYC, OGT, OS-9, pml-RARalpha fusion protein, PRDX5, PTPRK, H-ras, K-ras (V-Ki-ras2 Kirsten rat sarcoma viral oncogene), N-ras, RBAF600, SIRT2, SNRPDl, SSX, SSX2, SYT-SSX1 or -SSX2 fusion protein, TGFbetaRII, Triosephosphate isomerase, ormdm-2, LMP2, HPV E6, HPV E7, EGFRvIII (epidermal growth factor variant III), Idiotype, GD2, ganglioside G2), Ras-mutant, p53 (mutant), Proteinase3 (PRI), Tyrosinase, PSA, hTERT, Sarcoma translocation breakpoints, EphA2, prostatic acid phosphatase PAP, neo-PAP, ML-IAP, AFP, ERG (TMPRSS2 ETS Fusion gene), NAI 7, PAX3, ALK, Androgen Receptor, Cyclin B1, Polysialic acid, MYCN, TRP2, TRP2-Int2, GD3, Fucosyl GMI, Mesothelin, PSCA, sLe(a), cyp1B1, PLACI, GM3, BORIS, Tn, GLoboH, NY-BR-I, SART3, STn, Carbonic Anhydrase IX, OY-TESI, Sperm protein 17, LCK, high molecular weight melanoma-associated antigen (HMWMAA), AKAP-4, SSX2, XAGE 1, B7H3, Legumain, Tie 2, Page4, VEGFR2, MAD-CT-I, FAP, PDGFR-beta, MADCT-2, For-related antigen 1, TRPI, GP100, CA-125, CA19-9, Calretinin, Epithelial membrane antigen (EMA), Epithelial tumor antigen (ETA), CD19, CD34, CD99, CDI 17, Chromogranin, Cytokeratin, Desmin, Glial fibrillary acidic protein (GFAP), gross cystic disease fluid protein (GCDFP-15), HMB-45 antigen, Myo-DI, muscle-specific actin (MSA), neurofilament, neuronspecific enolase (NSE), placental alkaline phosphatase, synaptophysis, thyroglobulin, thyroid transcription factor-1, dimeric form of the pyruvate kinase isoenzyme type M2 (tumor M2-PK), BAGE BAGE-1, CAGE, CTAGE, FATE, GAGE, GAGE-I, GAGE-2, GAGE-3, GAGE-4, GAGE-5, GAGE-6, GAGE-7, HCA661, HOM-TES-85, MAGEA, MAGEB, MAGEC, NA88, NY-SAR-35, SPANXBI, SPAI 7, SSX, SYCP1, TPTE, Carbohydrate/ganglioside GM2 (oncofetal antigen-immunogenic-1 OFA-I-1), GM3, CA 15-3 (CA 27.29\BCAA), CA 195, CA 242, CA 50, CAM 43, CEA, EBNA, EF2, Epstein-Barr virus antigen, HLA-A2, HLA-Al 1, HSP70-2, KIAAO205, MUM-I, MUM-2, MUM-3, Myosin class I, GnTV, Herv-K-mel, LAGE-I, LAGE-2, (sperm protein) SPI 7, SCP-I, P15(58), Hom/Mel-40, E2A-PRL, H4-RET, IGH-IGK, MYL-RAR, TSP-180, P185erbB2, p180erbB-3, c-met, nm-23H1, TAG-72, TAG-72-4, CA-72-4, CAM 17.1, NuMa, 13-catenin, P16, TAGE, CT7, 43-9F, 5T4, 791Tgp72, 13HCG, BCA225, BTAA, CD68\KP1, CO-029, HTgp-175, M344, MG7-Ag, MOV18, NB\70\K, NYCO-1, RCAS1, SDCCAG16, TA-90, TAAL6, TLP, TPS, CD22, CD27, CD30, CD70, prostein, TARP (T cell receptor gamma alternate reading frame protein), Trp-p8, integrin avβ3 (CD61), galactin, or Ral-B, CD123, CLL-1, CD38, CS-1, CD138, and ROR1.

[0036] In certain embodiments, the expression of the heterologous non-arenaviral polypeptide or the expression of the second heterologous non-arenaviral polypeptide is under control of an arenavirus 3′ UTR; and the expression level of the heterologous non-arenaviral polypeptide or the expression level of the second heterologous non-arenaviral polypeptide is at least about 1%, 2%, 3%, 4%, 5%, 6%, 7%, 8%, 9%, 10%, 15%, 20%, 30%, 40%, 50%, 60%, 70%, 80%, 90%, 100%, 1.5-fold, 2-fold, 3-fold, 4-fold, 5-fold, 6-fold, 7-fold, 8-fold, 9-fold, 10-fold, 12-fold, 15-fold, 18-fold, 20-fold, 25-fold, or 30-fold higher than the expression level of the same heterologous non-arenaviral polypeptide expressed under control of the respective arenavirus 5′ UTR or the expression level of the same second heterologous non-arenaviral polypeptide expressed under control of the respective arenavirus 5′ UTR.

[0037] In certain embodiments, the expression of the heterologous non-arenaviral polypeptide is under control of an arenavirus 3′ UTR and the expression of the second heterologous non-arenaviral polypeptide is under control of an arenavirus 5′ UTR, wherein the proportion of cells expressing both the heterologous non-arenaviral polypeptide and the second heterologous non-arenaviral polypeptide, after an arenavirus particle containing a genome comprising the nucleotide sequence infects a population of cells, is at least about 1%, 2%, 3%, 4%, 5%, 6%, 7%, 8%, 9%, 10%, 15%, 20%, 30%, 40%, 50%, 60%, 70%, 80%, 90%, 100%, 1.5-fold, 2-fold, 3-fold, 4-fold, 5-fold, 6-fold, 7-fold, 8-fold, 9-fold, 10-fold, 12-fold, 15-fold, 18-fold, 20-fold, 25-fold, or 30-fold higher than the proportion of cells expressing both the same heterologous non-arenaviral polypeptide and the same second heterologous non-arenaviral polypeptide expressed under control of arenavirus 5′ UTRs, after an arenavirus particle containing a genome comprising a nucleotide sequence encoding the same heterologous non-arenaviral polypeptide and the same second heterologous non-arenaviral polypeptide expressed under control of arenavirus 5′ UTRs infects a comparable population of cells.

[0038] In certain embodiments, provided herein is a translation product of the nucleotide sequence provided herein.

[0039] In certain embodiments, provided herein is an arenavirus particle containing a genome comprising the nucleotide sequence provided herein. In certain embodiments, the genome of the arenavirus particle consists of an S segment and an L segment.

[0040] In certain embodiments, the arenavirus particle is tri-segmented. In certain embodiments, the tri-segmented arenavirus particle comprises two S segments and an L segment. In certain embodiments, the tri-segmented arenavirus particle comprises an S segment and two L segments.

[0041] In certain embodiments, the genome of the arenavirus particle consists of
[0042] a) an S segment that encodes the arenavirus GP signal peptide and a heterologous non-arenaviral polypeptide or the arenavirus GP signal peptide alone under the control of an arenavirus 3′ UTR and a heterologous non-arenaviral signal peptide, arenavirus GP1 and arenavirus GP2 under the control of an arenavirus 5′ UTR;
[0043] b) an S segment that encodes NP under the control of an arenavirus 3′ UTR and another heterologous non-arenaviral polypeptide or no polypeptide under the control of an arenavirus 5′ UTR; and
[0044] c) an L segment that encodes L protein under the control of an arenavirus 3′ UTR and Z protein under the control of an arenavirus 5′ UTR; and
   wherein the two heterologous non-arenaviral polypeptides are the same or different from each other.

[0045] In certain embodiments, the genome of the arenavirus particle consists of
[0046] a) an S segment that encodes arenavirus GP signal peptide and a heterologous non-arenaviral polypeptide or arenavirus GP signal peptide alone under the control of an arenavirus 3′ UTR and another heterologous non-arenaviral polypeptide or no polypeptide under the control of an arenavirus 5′ UTR;
[0047] b) an S segment that encodes NP under the control of an arenavirus 3′ UTR and a heterologous non-arenaviral signal peptide, arenavirus GP1 and arenavirus GP2 under the control of an arenavirus 5′ UTR; and
[0048] c) an L segment that encodes L protein under the control of an arenavirus 3′ UTR and Z protein under the control of an arenavirus 5′ UTR; and wherein the two heterologous non-arenaviral polypeptides are the same or different from each other.

[0049] In certain embodiments, the arenavirus particle is derived from a Lassa virus. In certain embodiments, the arenavirus particle is derived from a Lymphocytic choriomeningitis virus (LCMV). In certain embodiments, the LCMV is a MP strain, a WE strain, an Armstrong strain, or an Armstrong Clone 13 strain. In certain embodiments, the arenavirus particle is derived from a Pichinde virus (PICV). In certain embodiments, the arenavirus particle is derived from a Junin virus vaccine Candid #1, or a Junin virus vaccine XJ Clone 3 strain. In certain embodiments, the arenavirus particle is derived from an Oliveros virus. In certain embodiments, the arenavirus particle is derived from a Tamiami virus. In certain embodiments, the arenavirus particle is derived from a Mobala virus. In certain embodiments, the arenavirus particle is derived from a Mopeia virus. In certain embodiments, the arenavirus particle is derived from an Ippy virus. In certain embodiments, the arenavirus particle is derived from an Amapari virus. In certain embodiments, the arenavirus particle is derived from a Flexal virus. In certain embodiments, the arenavirus particle is derived from a Guanarito virus. In certain embodiments, the arenavirus particle is derived from a Latino virus. In certain embodiments, the arenavirus particle is derived from a Machupo virus. In certain embodiments, the arenavirus particle is derived from a Parana virus. In certain embodiments, the arenavirus particle is derived from a Pirital virus. In certain embodiments, the arenavirus particle is derived from a Sabia virus. In certain embodiments, the arenavirus particle is derived from a Tacaribe virus. In certain embodiments, the arenavirus particle is derived from a Bear Canyon virus. In certain embodiments, the arenavirus particle is derived from a Whitewater Arroyo virus. In certain embodiments, the arenavirus particle is derived from a Allpahuayo virus (ALLV). In certain embodiments, the arenavirus particle is derived from an Alxa virus. In certain embodiments, the arenavirus particle is derived from a Chapare virus. In certain embodiments, the arenavirus particle is derived from a Lijiang virus. In certain embodiments, the arenavirus particle is derived from a Cupixi virus. In certain embodiments, the arenavirus particle is derived from a Gairo virus. In certain embodiments, the arenavirus particle is derived from a Loei River virus. In certain embodiments, the arenavirus particle is derived from a Lujo virus. In certain embodiments, the arenavirus particle is derived from a Luna virus. In certain embodiments, the arenavirus particle is derived from a Luli virus. In certain embodiments, the arenavirus particle is derived from a Lunk virus. In certain embodiments, the arenavirus particle is derived from a Mariental virus. In certain embodiments, the arenavirus particle is derived from a Merino Walk virus. In certain embodiments, the arenavirus particle is derived from a Morogoro virus. In certain embodiments, the arenavirus particle is derived from an Okahandja virus. In certain embodiments, the arenavirus particle is derived from an Aporé virus. In certain embodiments, the arenavirus particle is derived from a Ryukyu virus. In certain embodiments, the arenavirus particle is derived from a Solwezi virus. In certain embodiments, the arenavirus particle is derived from a souris virus. In certain embodiments, the arenavirus particle is derived from a Wenzhou virus. In certain embodiments, the arenavirus particle is derived from a Big Brushy Tank virus. In certain embodiments, the arenavirus particle is derived from a Catarina virus. In certain embodiments, the arenavirus particle is derived from a Skinner Tank virus. In certain embodiments, the arenavirus particle is derived from a Tonto Creek virus. In certain embodiments, the arenavirus particle is derived from a Xapuri virus.

[0050] In certain embodiments, the genome of the arenavirus particle encodes the heterologous non-arenaviral polypeptide, and the growth or infectivity of the arenavirus particle is not inferior to a second arenavirus particle, wherein the genome of the second arenavirus particle encodes the same heterologous non-arenaviral polypeptide; and wherein all arenaviral GP, NP, Z and L in the second arenavirus particle are each expressed as one ORF.

[0051] In certain embodiments, the arenavirus particle is infectious and replication competent. In certain embodiments, the arenavirus particle is attenuated as compared to its parental virus. In certain embodiments, the arenavirus particle is infectious but unable to produce further infectious progeny in non-complementing cells.

[0052] In certain embodiments, the titer of the arenavirus particle is at least about 1%, 2%, 3%, 4%, 5%, 6%, 7%, 8%, 9%, 10%, 15%, 20%, 30%, 40%, 50%, 60%, 70%, 80%, 90%, 100%, 1.5-fold, 2-fold, 3-fold, 4-fold, 5-fold, 6-fold, 7-fold, 8-fold, 9-fold, 10-fold, 12-fold, 15-fold, 18-fold, 20-fold, 25-fold, or 30-fold lower during a persistent infection in AGRAG mice than the titer of the respective wild-type parental arenavirus particle.

[0053] In certain embodiments, the arenavirus particle expresses a heterologous non-arenaviral polypeptide under control of an arenavirus 3′ UTR; wherein the arenavirus particle induces at least about 1%, 2%, 3%, 4%, 5%, 6%, 7%, 8%, 9%, 10%, 15%, 20%, 30%, 40%, 50%, 60%, 70%, 80%, 90%, 100%, 1.5-fold, 2-fold, 3-fold, 4-fold, 5-fold, 6-fold, 7-fold, 8-fold, 9-fold, 10-fold, 12-fold, 15-fold, 18-fold, 20-fold, 25-fold, or 30-fold higher immune responses against the heterologous non-arenaviral polypeptide in a subject after the arenavirus particle is administered to the subject as compared to after another arenavirus particle expressing the same heterologous non-arenaviral polypeptide under control of an arenavirus 5′ UTR is administered to the subject or to a comparable subject.

[0054] In certain embodiments, the nucleotide sequence is a DNA sequence, which can be transcribed into an arenavirus genomic or antigenomic segment. In certain embodiments, provided herein is a method of producing an arenavirus genomic or antigenomic RNA segment, wherein the method comprises transcribing the DNA sequence provided herein.

[0055] In certain embodiments, provided herein is a method of generating an arenavirus particle, wherein the method comprises:
[0056] a) transfecting into a host cell one or more DNA sequences provided herein or one or more RNA sequences each transcribed in vitro from the DNA sequence provided herein;
[0057] b) transfecting into the host cell nucleotide sequences encoding arenavirus trans-acting factors;
[0058] c) maintaining the host cell under conditions suitable for virus formation; and
[0059] d) harvesting the arenavirus particle.

[0060] In certain embodiments, the one or more DNA sequences are transcribed using a bidirectional promoter. In certain embodiments, the one or more DNA sequences are transcribed under the control of a promoter selected from the group consisting of:
[0061] a) a RNA polymerase I promoter;
[0062] b) a RNA polymerase II promoter; and
[0063] c) a T7 promoter.

[0064] In certain embodiments, provided herein is a DNA expression vector comprising the nucleotide sequence provided herein.

[0065] In certain embodiments, provided herein is a method of rescuing an arenavirus particle using the nucleotide sequence provided herein.

[0066] In certain embodiments, provided herein is a host cell comprising the nucleotide sequence provided herein, the translation product provided herein, the arenavirus particle provided herein, or the DNA expression vector provided herein.

[0067] In certain embodiments, provided herein is a vaccine comprising the nucleotide sequence provided herein, the translation product provided herein, the arenavirus particle provided herein, or the DNA expression vectorprovided herein, and a pharmaceutically acceptable carrier.

[0068] In certain embodiments, provided herein is a pharmaceutical composition comprising the nucleotide sequence provided herein, the translation product provided herein, the arenavirus particle provided herein, or the DNA expression vectorprovided herein, and a pharmaceutically acceptable carrier.

### 3.2 Arenavirus Particles and Related Compositions and Methods

[0069] In another aspect, provided herein are arenavirus particles. In certain embodiments, provided herein is an arenavirus particle engineered such that an arenaviral ORF is separated over two or more mRNA transcripts.

[0070] In certain embodiments, at least one of the mRNA transcripts comprises an internal ribosome entry site (IRES).

[0071] In certain embodiments, the mRNA transcripts can be transcribed from the arenavirus genomic or antigenomic segment. In certain embodiments, the arenavirus genomic or antigenomic segment is an S segment. In certain embodiments, the arenavirus genomic or antigenomic segment is an L segment.

[0072] In certain embodiments, the two or more mRNA transcripts are under control of an arenavirus 3′ UTR or an arenavirus 5′ UTR.

[0073] In certain embodiments, the arenaviral ORF encodes a polypeptide comprising an amino acid sequence that is at least 80%, 85%, 90%, 95%, 96%, 97%, 98%, 99% and 100% identical to the amino acid sequence of SEQ ID NO:1, SEQ ID NO:2, SEQ ID NO:3, SEQ ID NO:4, SEQ ID NO:5, SEQ ID NO:6, SEQ ID NO:7, SEQ ID NO:8, SEQ ID NO:9, SEQ ID NO:10, SEQ ID NO: 11, SEQ ID NO:12, SEQ ID NO:13, SEQ ID NO:14, SEQ ID NO:15, SEQ ID NO:16, SEQ ID NO:17, SEQ ID NO:18, SEQ ID NO:19, SEQ ID NO:20, SEQ ID NO:21, SEQ ID NO:22, SEQ ID NO:23, SEQ ID NO:24, SEQ ID NO:48, SEQ ID NO:52, SEQ ID NO:59, SEQ ID NO:66, SEQ ID NO:73, SEQ ID NO:80, SEQ ID NO:84, SEQ ID NO:91, SEQ ID NO:98, SEQ ID NO:105, SEQ ID NO:109, SEQ ID NO:113, SEQ ID NO:120, SEQ ID NO:127, SEQ ID NO:134, SEQ ID NO:49, SEQ ID NO:56, SEQ ID NO:63, SEQ ID NO:70, SEQ ID NO:77, SEQ ID NO:81, SEQ ID NO:88, SEQ ID NO:95, SEQ ID NO:102, SEQ ID NO:106, SEQ ID NO:110, SEQ ID NO: 117, SEQ ID NO:124, SEQ ID NO:131, SEQ ID NO:138, SEQ ID NO:50, SEQ ID NO:57, SEQ ID NO:64, SEQ ID NO:71, SEQ ID NO:78, SEQ ID NO:82, SEQ ID NO:89, SEQ ID NO:96, SEQ ID NO:103, SEQ ID NO:107, SEQ ID NO:111, SEQ ID NO: 118, SEQ ID NO:125, SEQ ID NO:132, SEQ ID NO:139, SEQ ID NO:51, SEQ ID NO:58, SEQ ID NO:65, SEQ ID NO:72, SEQ ID NO:79, SEQ ID NO:83, SEQ ID NO:90, SEQ ID NO:97, SEQ ID NO:104, SEQ ID NO:108, SEQ ID NO: 112, SEQ ID NO: 119, SEQ ID NO:126, SEQ ID NO:133, or SEQ ID NO:140. In certain embodiments, the arenaviral ORF encodes a polypeptide comprising an amino acid sequence that is identical to SEQ ID NO:1, SEQ ID NO:2, SEQ ID NO:3, SEQ ID NO:4, SEQ ID NO:5, SEQ ID NO:6, SEQ ID NO:48, SEQ ID NO:52, SEQ ID NO:59, SEQ ID NO:66, SEQ ID NO:73, SEQ ID NO:80, SEQ ID NO:84, SEQ ID NO:91, SEQ ID NO:98, SEQ ID NO:105, SEQ ID NO:109, SEQ ID NO:113, SEQ ID NO:120, SEQ ID NO:127, or SEQ ID NO:134.

[0074] In certain embodiments, the arenaviral ORF encodes arenavirus GP signal peptide, arenavirus GP1 and GP2 and the arenavirus GP signal peptide or a functional fragment thereof is expressed from a first mRNA transcript (e.g., viral mRNA transcript) and arenavirus GP1 and GP2 are expressed from a second mRNA transcript (e.g., viral mRNA transcript).

[0075] In certain embodiments, the first mRNA transcript is under control of an arenavirus 3′ UTR.

[0076] In certain embodiments, the second mRNA transcript further encodes a heterologous non-arenaviral signal peptide.

[0077] In certain embodiments, the heterologous non-arenaviral signal peptide is the signal peptide of the vesicular stomatitis virus serotype Indiana glycoprotein.

[0078] In certain embodiments, the first mRNA transcript further comprises a nucleotide sequence encoding a heterologous non-arenaviral polypeptide or arenavirus GP, NP, Z and L.

[0079] In certain embodiments, the heterologous non-arenaviral polypeptide is an antigen derived from an infectious organism, tumor, or allergen. In certain embodiments, the antigen is selected from the group consisting of

(a) viral antigens, and the viral antigen is from a virus family selected from the group consisting of adenoviridae, herpesviridae, leviviridae, orthomyxoviridae, parvoviridae, filoviridae, hantaviridae, poxviridae, papillomaviridae, polyomaviridae, paramyxoviridae, pneumoviridae, picornaviridae, reoviridae, retroviridae, flaviviridae, hepadnaviridae, togaviridae, rhabdoviridae, arenaviridae, and coronaviridae;
(b) bacterial antigens, and the bacterial antigen is from a bacteria family selected from the group consisting of Aquaspirillum family, Azospirillum family, Azotobacteraceae family, Bacteroidaceae family, Bartonellaceae family, Bdellovibrio family, Campylobacteraceae family, Chlamydiaceae family, Clostridiaceae family, Enterobacteriaceae family, Gardinella family, Pasteurellaceae family, Halobacteriaceae family, Helicobacter family, Legionallaceae family, Listeriaceae family, Methylococcaceae family, mycobacteriaceae, Neisseriaceae family, Oceanospirillum family, Pasteurellaceae family, Streptococcaceae family, Pseudomonadaceae family, Rhizobiaceae family, Spirillum family, Spirosomaceae family, Staphylococcaceae family, Helicobacter family, Yersinia family, Bacillus antracis and Vampirovibrio family, and (c) tumor neoantigens or neo-epitopes and tumor associated antigens; and the tumor associated antigen is selected from the group consisting of artificial fusion protein of HPV 16 E7 and E6 proteins, oncogenic viral antigens, cancer-testis antigens, oncofetal antigens, tissue differentiation antigens, mutant protein antigens, Adipophilin, AIM-2, ALDHIAI, BCLX (L), BING-4, CALCA, CD45, CPSF, cyclin DI, DKKI, ENAH (hMcna), Ga733 (EpCAM), EphA3, EZH2, FGF5, glypican-3, G250/MN/CAIX, HER-2/neu, IDOI, IGF2B3, IL13Ralpha2, Intestinal carboxyl esterase, alphafoetoprotein, Kallikrein 4, KIF20A, Lengsin, M-CSF, MCSP, mdm-2, Meloe, MMP-2, MMP-7, MUCl, MUC5AC, p53 (non-mutant), PAX5, PBF, PRAME, PSMA, RAGE, RAGE-I, RGS5, RhoC, RNF43, RU2AS, secernin 1, SOX10, STEAPI (six-transmembrane epithelial antigen of the prostate 1), survivin, Telomerase, VEGF, WT1, EGF-R, CEA, CD20, CD33, CD52, MELANA/MART1, MART2, NY-ESO-1, p53, MAGE Al, MAGE A3, MAGE-4, MAGE-5, MAGE-6, CDK4, alpha-actinin-4, ARTC1, BCR-ABL, BCR-ABL fusion protein (b3a2), B-RAF, CASP-5, CASP-8, beta-catenin, Cdc27, CDK4, CDKN2A, CLPP, COA-1, dek-can fusion protein, EFTUD2, Elongation factor 2, ETV6-AML, ETV6-AML1 fusion protein, FLT3-ITD, FNl, GPNMB, LDLR-fucosyltransferase fusion protein, NFYC, OGT, OS-9, pml-RARalpha fusion protein, PRDX5, PTPRK, H-ras, K-ras (V-Ki-ras2 Kirsten rat sarcoma viral oncogene), N-ras, RBAF600, SIRT2, SNRPDl, SSX, SSX2, SYT-SSX1 or -SSX2 fusion protein, TGFbetaRII, Triosephosphate isomerase, ormdm-2, LMP2, HPV E6, HPV E7, EGFRvIII (epidermal growth factor variant III), Idiotype, GD2, ganglioside G2), Ras-mutant, p53 (mutant), Proteinase3 (PRI), Tyrosinase, PSA, hTERT, Sarcoma translocation breakpoints, EphA2, prostatic acid phosphatase PAP, neo-PAP, ML-IAP, AFP, ERG (TMPRSS2 ETS Fusion gene), NAI 7, PAX3, ALK, Androgen Receptor, Cyclin B1, Polysialic acid, MYCN, TRP2, TRP2-Int2, GD3, Fucosyl GMI, Mesothelin, PSCA, sLe(a), cyp1B1, PLACI, GM3, BORIS, Tn, GLoboH, NY-BR-I, SART3, STn, Carbonic Anhydrase IX, OY-TESI, Sperm protein 17, LCK, high molecular weight melanoma-associated antigen (HMWMAA), AKAP-4, SSX2, XAGE 1, B7H3, Legumain, Tie 2, Page4, VEGFR2, MAD-CT-I, FAP, PDGFR-beta, MADCT-2, For-related antigen 1, TRPI, GP100, CA-125, CA19-9, Calretinin, Epithelial membrane antigen (EMA), Epithelial tumor antigen (ETA), CD19, CD34, CD99, CDI 17, Chromogranin, Cytokeratin, Desmin, Glial fibrillary acidic protein (GFAP), gross cystic disease fluid protein (GCDFP-15), HMB-45 antigen, Myo-D1, muscle-specific actin (MSA), neurofilament, neuronspecific enolase (NSE), placental alkaline phosphatase, synaptophysis, thyroglobulin, thyroid transcription factor-1, dimeric form of the pyruvate kinase isoenzyme type M2 (tumor M2-PK), BAGE BAGE-1, CAGE, CTAGE, FATE, GAGE, GAGE-I, GAGE-2, GAGE-3, GAGE-4, GAGE-5, GAGE-6, GAGE-7, HCA661, HOM-TES-85, MAGEA, MAGEB, MAGEC, NA88, NY-SAR-35, SPANXBI, SPAI 7, SSX, SYCP1, TPTE, Carbohydrate/ganglioside GM2 (oncofetal antigen-immunogenic-1 OFA-I-1), GM3, CA 15-3 (CA 27.29\BCAA), CA 195, CA 242, CA 50, CAM 43, CEA, EBNA, EF2, Epstein-Barr virus antigen, HLA-A2, HLA-Al 1, HSP70-2, KIAAO205, MUM-I, MUM-2, MUM-3, Myosin class I, GnTV, Herv-K-mel, LAGE-I, LAGE-2, (sperm protein) SPI 7, SCP-I, P15(58), Hom/Mel-40, E2A-PRL, H4-RET, IGH-IGK, MYL-RAR, TSP-180, P185erbB2, p180erbB-3, c-met, nm-23H1, TAG-72, TAG-72-4, CA-72-4, CAM 17.1, NuMa, 13-catenin, P16, TAGE, CT7, 43-9F, 5T4, 791Tgp72, 13HCG, BCA225, BTAA, CD68\KP1, CO-029, HTgp-175, M344, MG7-Ag, MOV18, NB\70K, NYCO-1, RCAS1, SDCCAG16, TA-90, TAAL6, TLP, TPS, CD22, CD27, CD30, CD70, prostein, TARP (T cell receptor gamma alternate reading frame protein), Trp-p8, integrin avβ3 (CD61), galactin, or Ral-B, CD123, CLL-1, CD38, CS-1, CD138, and ROR1.

[0080] In certain embodiments, the expression level of the heterologous non-arenaviral polypeptide expressed under control of an arenavirus 3′ UTR is at least about 1%, 2%, 3%, 4%, 5%, 6%, 7%, 8%, 9%, 10%, 15%, 20%, 30%, 40%, 50%, 60%, 70%, 80%, 90%, 100%, 1.5-fold, 2-fold, 3-fold, 4-fold, 5-fold, 6-fold, 7-fold, 8-fold, 9-fold, 10-fold, 12-fold, 15-fold, 18-fold, 20-fold, 25-fold, or 30-fold higher than the expression level of the same heterologous non-arenaviral polypeptide expressed under control of the respective arenavirus 5′ UTR.

[0081] In certain embodiments, the expression of a first of the two heterologous non-arenaviral polypeptides is under control of an arenavirus 3′ UTR in a first S segment and the expression of a second of the two heterologous non-arenaviral polypeptides is under control of an arenavirus 5′ UTR in a second S segment, wherein the proportion of cells expressing both the two heterologous non-arenaviral polypeptides after the arenavirus particle infects a population of cells is at least about 1%, 2%, 3%, 4%, 5%, 6%, 7%, 8%, 9%, 10%, 15%, 20%, 30%, 40%, 50%, 60%, 70%, 80%, 90%, 100%, 1.5-fold, 2-fold, 3-fold, 4-fold, 5-fold, 6-fold, 7-fold, 8-fold, 9-fold, 10-fold, 12-fold, 15-fold, 18-fold, 20-fold, 25-fold, or 30-fold higher than the proportion of cells expressing both the same two heterologous non-arenaviral polypeptides after an arenavirus particle expressing the same two heterologous non-arenaviral polypeptides under control of arenavirus 5′ UTRs infects a comparable population of cells, and wherein the expression of a first of the same two heterologous non-arenaviral polypeptides is under control of an arenavirus 5′ UTR in a first S segment and the expression of a second of the same two heterologous non-arenaviral polypeptides is under control of an arenavirus 5′ UTR in a second S segment.

[0082] In certain embodiments, the genome of the arenavirus particle encodes the heterologous non-arenaviral polypeptide and/or the second heterologous non-arenaviral polypeptide, and the growth or infectivity of the arenavirus particle is not inferior to a second arenavirus particle, wherein the genome of the second arenavirus particle encodes the same heterologous non-arenaviral polypeptide and/or the same second heterologous non-arenaviral polypeptide; and wherein all arenaviral GP, NP, Z and L in the second arenavirus particle are each expressed as one ORF.

[0083] In certain embodiments, the genome of the arenavirus particle consists of an S segment and an L segment.

[0084] In certain embodiments, the arenavirus particle is tri-segmented. In certain embodiments, the tri-segmented arenavirus particle comprises two S segments and an L segment. In certain embodiments, the tri-segmented arenavirus particle comprises an S segment and two L segments.

[0085] In certain embodiments, the arenavirus particle comprises a genome organization as outlined in FIG. 4C. In certain embodiments, the arenavirus particle comprises a genome organization as outlined in FIG. 4E.

[0086] In certain embodiments, the genome of the arenavirus particle consists of
[0087] a) an S segment that encodes arenavirus GP signal peptide and a heterologous non-arenaviral polypeptide or arenavirus GP signal peptide alone under the control of an arenavirus 3′ UTR and a heterologous non-arenaviral signal peptide, arenavirus GP1 and arenavirus GP2 under the control of an arenavirus 5′ UTR;
[0088] b) an S segment that encodes NP under the control of an arenavirus 3′ UTR and another heterologous non-arenaviral polypeptide or no polypeptide under the control of an arenavirus 5′ UTR; and
[0089] c) an L segment that encodes L protein under the control of an arenavirus 3′ UTR and Z protein under the control of an arenavirus 5′ UTR; and
   wherein the two heterologous non-arenaviral polypeptides are the same or different from each other.

[0090] In certain embodiments, the genome of the arenavirus particle consists of
[0091] a) an S segment that encodes arenavirus GP signal peptide and a heterologous non-arenaviral polypeptide or arenavirus GP signal peptide alone under the control of an arenavirus 3′ UTR and another heterologous non-arenaviral polypeptide or no polypeptide under the control of an arenavirus 5′ UTR;
[0092] b) an S segment that encodes NP under the control of an arenavirus 3′ UTR and a heterologous non-arenaviral signal peptide, arenavirus GP1 and arenavirus GP2 under the control of an arenavirus 5′ UTR; and
[0093] c) an L segment that encodes L protein under the control of an arenavirus 3′ UTR and Z protein under the control of an arenavirus 5′ UTR; and
   wherein the two heterologous non-arenaviral polypeptides are the same or different from each other.

[0094] In certain embodiments, the arenavirus particle is derived from a Lassa virus. In certain embodiments, the arenavirus particle is derived from a Lymphocytic choriomeningitis virus (LCMV). In certain embodiments, the LCMV is a MP strain, a WE strain, an Armstrong strain, or an Armstrong Clone 13 strain. In certain embodiments, the arenavirus particle is derived from a Pichinde virus (PICV). In certain embodiments, the arenavirus particle is derived from a Junin virus vaccine Candid #1, or a Junin virus vaccine XJ Clone 3 strain. In certain embodiments, the arenavirus particle is derived from an Oliveros virus. In certain embodiments, the arenavirus particle is derived from a Tamiami virus. In certain embodiments, the arenavirus particle is derived from a Mobala virus. In certain embodiments, the arenavirus particle is derived from a Mopeia virus. In certain embodiments, the arenavirus particle is derived from an Ippy virus. In certain embodiments, the arenavirus particle is derived from an Amapari virus. In certain embodiments, the arenavirus particle is derived from a Flexal virus. In certain embodiments, the arenavirus particle is derived from a Guanarito virus. In certain embodiments, the arenavirus particle is derived from a Latino virus. In certain embodiments, the arenavirus particle is derived from a Machupo virus. In certain embodiments, the arenavirus particle is derived from a Parana virus. In certain embodiments, the arenavirus particle is derived from a Pirital virus. In certain embodiments, the arenavirus particle is derived from a Sabia virus. In certain embodiments, the arenavirus particle is derived from a Tacaribe virus. In certain embodiments, the arenavirus particle is derived from a Bear Canyon virus. In certain embodiments, the arenavirus particle is derived from a Whitewater Arroyo virus. In certain embodiments, the arenavirus particle is derived from a Allpahuayo virus (ALLV). In certain embodiments, the arenavirus particle is derived from an Alxa virus. In certain embodiments, the arenavirus particle is derived from a Chapare virus. In certain embodiments, the arenavirus particle is derived from a Lijiang virus. In certain embodiments, the arenavirus particle is derived from a Cupixi virus. In certain embodiments, the arenavirus particle is derived from a Gairo virus. In certain embodiments, the arenavirus particle is derived from a Loei River virus. In certain embodiments, the arenavirus particle is derived from a Lujo virus. In certain embodiments, the arenavirus particle is derived from a Luna virus. In certain embodiments, the arenavirus particle is derived from a Luli virus. In certain embodiments, the arenavirus particle is derived from a Lunk virus. In certain embodiments, the arenavirus particle is derived from a Mariental virus. In certain embodiments, the arenavirus particle is derived from a Merino Walk virus. In certain embodiments, the arenavirus particle is derived from a Morogoro virus. In certain embodiments, the arenavirus particle is derived from an Okahandja virus. In certain embodiments, the arenavirus particle is derived from an Aporé virus. In certain embodiments, the arenavirus particle is derived from a Ryukyu virus. In certain embodiments, the arenavirus particle is derived from a Solwezi virus. In certain embodiments, the arenavirus particle is derived from a souris virus. In certain embodiments, the arenavirus particle is derived from a Wenzhou virus. In certain embodiments, the arenavirus particle is derived from a Big Brushy Tank virus. In certain embodiments, the arenavirus particle is derived from a Catarina virus. In certain embodiments, the arenavirus particle is derived from a Skinner Tank virus. In certain embodiments, the arenavirus particle is derived from a Tonto Creek virus. In certain embodiments, the arenavirus particle is derived from a Xapuri virus.

[0095] In certain embodiments, the arenavirus particle is infectious and replication competent. In certain embodiments, the arenavirus particle is attenuated as compared to its parental wild-type virus. In certain embodiments, the arenavirus particle is infectious but unable to produce further infectious progeny in non-complementing cells.

[0096] In certain embodiments, the titer of the arenavirus particle is at least about 1%, 2%, 3%, 4%, 5%, 6%, 7%, 8%, 9%, 10%, 15%, 20%, 30%, 40%, 50%, 60%, 70%, 80%, 90%, 100%, 1.5-fold, 2-fold, 3-fold, 4-fold, 5-fold, 6-fold, 7-fold, 8-fold, 9-fold, 10-fold, 12-fold, 15-fold, 18-fold, 20-fold, 25-fold, or 30-fold lower during a persistent infection in AGRAG mice than the titer of the respective wild-type parental arenavirus particle.

[0097] In certain embodiments, the arenavirus particle expresses a heterologous non-arenaviral polypeptide under control of an arenavirus 3′ UTR; wherein the arenavirus particle induces at least about 1%, 2%, 3%, 4%, 5%, 6%, 7%, 8%, 9%, 10%, 15%, 20%, 30%, 40%, 50%, 60%, 70%, 80%, 90%, 100%, 1.5-fold, 2-fold, 3-fold, 4-fold, 5-fold, 6-fold, 7-fold, 8-fold, 9-fold, 10-fold, 12-fold, 15-fold, 18-fold, 20-fold, 25-fold, or 30-fold higher immune responses against the heterologous non-arenaviral polypeptide in a subject after the arenavirus particle is administered to the subject as compared to after another arenavirus particle expressing the same heterologous non-arenaviral polypeptide under control of an arenavirus 5′ UTR is administered to the subject or to a comparable subject.

[0098] In certain embodiments, provided herein is a translation product of the mRNA transcripts of the genome of the arenavirus particle provided herein.

[0099] In certain embodiments, provided herein is a cDNA of the mRNA transcript of the genome of the arenavirus particle provided herein, wherein the cDNA can be transcribed into an arenavirus genomic or antigenomic segment.

[0100] In certain embodiments, provided herein is a method of producing an arenavirus genomic or antigenomic segment, wherein the method comprises transcribing the cDNA provided herein.

[0101] In certain embodiments, provided herein is a method of generating an arenavirus particle, wherein the method comprises:
[0102] a) transfecting into a host cell one or more cDNA of the mRNA transcript of the genome of the arenavirus particle provided herein or one or more RNA sequences each transcribed in vitro from the cDNA of the mRNA transcript of the genome of the arenavirus particle provided herein;
[0103] b) transfecting into the host cell nucleotide sequences encoding arenavirus trans-acting factors;
[0104] c) maintaining the host cell under conditions suitable for virus formation; and
[0105] d) harvesting the arenavirus particle.

[0106] In certain embodiments, the one or more cDNA sequences are transcribed using a bidirectional promoter. In certain embodiments, the one or more cDNA sequences are transcribed under the control of a promoter selected from the group consisting of:
[0107] a) a RNA polymerase I promoter;
[0108] b) a RNA polymerase II promoter; and
[0109] c) a T7 promoter.

[0110] In certain embodiments, provided herein is a DNA expression vector comprising the DNA sequence encoding the mRNA transcript of the genome of the arenavirus particle provided herein.

[0111] In certain embodiments, provided herein is a method of rescuing an arenavirus particle using the mRNA transcript of the genome of the arenavirus particle provided herein or the cDNA sequence thereof.

[0112] In certain embodiments, provided herein is a host cell comprising the arenavirus particle provided herein, the translation product provided herein, the cDNA provided herein, or the DNA expression vector provided herein.

[0113] In certain embodiments, provided herein is a vaccine comprising the arenavirus particle provided herein, the translation product provided herein, the cDNA provided herein, or the DNA expression vector provided herein, and a pharmaceutically acceptable carrier.

[0114] In certain embodiments, provided herein is a pharmaceutical composition comprising the arenavirus particle provided herein, the translation product provided herein, the cDNA provided herein, or the DNA expression vector provided herein, and a pharmaceutically acceptable carrier.

### 3.3 Arenavirus Genomic or Antigenomic Segments and Related Compositions and Methods

[0115] In another aspect, provided herein are arenavirus genomic or antigenomic segments. In certain embodiments, provided herein is an arenavirus genomic or antigenomic segment engineered such that the viral transcription thereof results in a first mRNA transcript and a second mRNA transcript,

wherein the first mRNA transcript comprises a nucleotide sequence encoding a functional fragment of a first polypeptide, and the first mRNA transcript does not encode the full-length first polypeptide;
wherein the second mRNA transcript comprises a nucleotide sequence encoding:
[0116] a) a second polypeptide; or
[0117] b) a functional fragment of the first polypeptide, and the second mRNA transcript does not encode the full-length first polypeptide; or
[0118] c) a functional fragment of a second polypeptide, and the second mRNA transcript does not encode the full-length second polypeptide; or
[0119] d) a heterologous non-arenaviral polypeptide; and
   wherein the first and second polypeptides are different from each other and selected from the group consisting of arenavirus GP, NP, Z and L.

[0120] In certain embodiments, the first mRNA transcript further comprises a nucleotide sequence encoding a second heterologous non-arenaviral polypeptide or a third polypeptide, wherein the third polypeptide is different from the first polypeptide and the second polypeptide and is selected from the group consisting of arenavirus GP, NP, Z and L; and wherein the heterologous non-arenaviral polypeptide and the second heterologous non-arenaviral polypeptide are the same or different from each other.

[0121] In certain embodiments, the second mRNA transcript further comprises a nucleotide sequence encoding a second heterologous non-arenaviral polypeptide or a third polypeptide, wherein the third polypeptide is different from the first polypeptide and the second polypeptide and is selected from the group consisting of arenavirus GP, NP, Z and L; and wherein the heterologous non-arenaviral polypeptide and the second heterologous non-arenaviral polypeptide are the same or different from each other.

[0122] In certain embodiments, the arenavirus GP, NP, Z and L are from LCMV, Lassa virus, Pichinde virus, Oliveros virus, Tamiami virus, Mobala virus, Mopeia virus, Ippy virus, Amapari virus, Flexal virus, Guanarito virus, Latino virus, Machupo virus, Parana virus, Pirital virus, Sabia virus, Tacaribe virus, Bear Canyon virus, Whitewater Arroyo virus, Allpahuayo virus (ALLV), Alxa virus, Chapare virus, Lijiang virus, Cupixi virus, Gairo virus, Loei River virus, Lujo virus, Luna virus, Luli virus, Lunk virus, Mariental virus, Merino Walk virus, Morogoro virus, Okahandja virus, Aporé virus, Ryukyu virus, Solwezi virus, souris virus, Wenzhou virus, Big Brushy Tank virus, Catarina virus, Skinner Tank virus, Tonto Creek virus, Xapuri virus, or Junin virus.

[0123] In certain embodiments, provided herein is an arenavirus genomic or antigenomic segment engineered such that the viral transcription thereof results in an mRNA transcript encoding:
[0124] a) a functional fragment of a first polypeptide, and
[0125] b) a heterologous non-arenaviral polypeptide or a second polypeptide;
   wherein the mRNA transcript does not encode the full-length first polypeptide; and wherein the first and second polypeptides are different from each other and selected from the group consisting of arenavirus GP, NP, Z and L.

[0126] In certain embodiments, the mRNA transcript is a first mRNA transcript and the viral transcription of the arenavirus genomic or antigenomic segment further results in a second mRNA transcript; wherein the second mRNA transcript comprises a nucleotide sequence encoding a third polypeptide; a functional fragment of a third polypeptide; or a second heterologous non-arenaviral polypeptide; wherein the third polypeptide is different from the first and the second polypeptide and selected from the group consisting of arenavirus GP, NP, Z and L, and wherein the heterologous non-arenaviral polypeptide and the second heterologous non-arenaviral polypeptide are the same or different from each other.

[0127] In certain embodiments, the second mRNA transcript comprises a nucleotide sequence encoding a functional fragment of a first polypeptide, and wherein the functional fragment encoded by the first mRNA transcript is different from the functional fragment encoded by the second mRNA transcript.

[0128] In certain embodiments, the viral transcription of the arenavirus genomic or antigenomic segment does not further result in a second mRNA transcript.

[0129] In certain embodiments, the mRNA transcript comprises an internal ribosome entry site (IRES).

[0130] In certain embodiments, the arenavirus genomic or antigenomic segment is an S segment. In certain embodiments, the arenavirus genomic or antigenomic segment is an L segment.

[0131] In certain embodiments, the functional fragment is under control of an arenavirus 3′ UTR. In certain embodiments, the functional fragment is under control of an arenavirus 5′ UTR.

[0132] In certain embodiments, the first, second and third polypeptide each comprises an amino acid sequence that is at least 80%, 85%, 90%, 95%, 96%, 97%, 98%, 99% or 100% identical to the amino acid sequence of SEQ ID NO:1, SEQ ID NO:2, SEQ ID NO:3, SEQ ID NO:4, SEQ ID NO:5, SEQ ID NO:6, SEQ ID NO:7, SEQ ID NO:8, SEQ ID NO:9, SEQ ID NO:10, SEQ ID NO: 11, SEQ ID NO:12, SEQ ID NO:13, SEQ ID NO:14, SEQ ID NO:15, or SEQ ID NO:16, SEQ ID NO:17, SEQ ID NO:18, SEQ ID NO:19, SEQ ID NO:20, SEQ ID NO:21, SEQ ID NO:22, SEQ ID NO:23, SEQ ID NO:24, SEQ ID NO:48, SEQ ID NO:52, SEQ ID NO:59, SEQ ID NO:66, SEQ ID NO:73, SEQ ID NO:80, SEQ ID NO:84, SEQ ID NO:91, SEQ ID NO:98, SEQ ID NO:105, SEQ ID NO:109, SEQ ID NO:113, SEQ ID NO:120, SEQ ID NO:127, SEQ ID NO:134, SEQ ID NO:49, SEQ ID NO:56, SEQ ID NO:63, SEQ ID NO:70, SEQ ID NO:77, SEQ ID NO:81, SEQ ID NO:88, SEQ ID NO:95, SEQ ID NO:102, SEQ ID NO:106, SEQ ID NO:110, SEQ ID NO: 117, SEQ ID NO:124, SEQ ID NO:131, SEQ ID NO:138, SEQ ID NO:50, SEQ ID NO:57, SEQ ID NO:64, SEQ ID NO:71, SEQ ID NO:78, SEQ ID NO:82, SEQ ID NO:89, SEQ ID NO:96, SEQ ID NO:103, SEQ ID NO:107, SEQ ID NO:111, SEQ ID NO: 118, SEQ ID NO:125, SEQ ID NO:132, SEQ ID NO:139, SEQ ID NO:51, SEQ ID NO:58, SEQ ID NO:65, SEQ ID NO:72, SEQ ID NO:79, SEQ ID NO:83, SEQ ID NO:90, SEQ ID NO:97, SEQ ID NO:104, SEQ ID NO:108, SEQ ID NO: 112, SEQ ID NO: 119, SEQ ID NO:126, SEQ ID NO:133, or SEQ ID NO:140.

[0133] In certain embodiments, the first polypeptide comprises an amino acid sequence identical to SEQ ID NO:1, SEQ ID NO:2, SEQ ID NO:3, or SEQ ID NO:4, SEQ ID NO:5, SEQ ID NO:6, SEQ ID NO:48, SEQ ID NO:52, SEQ ID NO:59, SEQ ID NO:66, SEQ ID NO:73, SEQ ID NO:80, SEQ ID NO:84, SEQ ID NO:91, SEQ ID NO:98, SEQ ID NO:105, SEQ ID NO:109, SEQ ID NO: 113, SEQ ID NO:120, SEQ ID NO:127, or SEQ ID NO:134.

[0134] In certain embodiments, the functional fragment of the first polypeptide comprises an amino acid sequence that is at least 80%, 85%, 90%, 95%, 96%, 97%, 98%, 99% or 100% identical to the amino acid sequence of SEQ ID NO:25, SEQ ID NO:26, SEQ ID NO:27, SEQ ID NO:28, SEQ ID NO:29, SEQ ID NO:30, SEQ ID NO:31, SEQ ID NO:32, SEQ ID NO:33, SEQ ID NO:142, SEQ ID NO:34, SEQ ID NO:35, SEQ ID NO:36, SEQ ID NO:37, SEQ ID NO:38, SEQ ID NO:39, SEQ ID NO:40, SEQ ID NO:41, SEQ ID NO:42, SEQ ID NO:53, SEQ ID NO:60, SEQ ID NO:67, SEQ ID NO:74, SEQ ID NO:85, SEQ ID NO:92, SEQ ID NO:99, SEQ ID NO: 114, SEQ ID NO:121, SEQ ID NO:128, SEQ ID NO:135, SEQ ID NO:54, SEQ ID NO:61, SEQ ID NO:68, SEQ ID NO:75, SEQ ID NO:86, SEQ ID NO:93, SEQ ID NO:100, SEQ ID NO: 115, SEQ ID NO:122, SEQ ID NO:129, SEQ ID NO:136, SEQ ID NO:55, SEQ ID NO:62, SEQ ID NO:69, SEQ ID NO:76, SEQ ID NO:87, SEQ ID NO:94, SEQ ID NO:101, SEQ ID NO: 116, SEQ ID NO:123, SEQ ID NO:130, or SEQ ID NO:137.

[0135] In certain embodiments, the functional fragment is an arenavirus GP signal peptide or a functional fragment thereof.

[0136] In certain embodiments, the heterologous non-arenaviral polypeptide, the second heterologous non-arenaviral polypeptide, or both heterologous non-arenaviral polypeptides are each an antigen derived from an infectious organism, tumor, or allergen. In certain embodiments, the antigen is selected from the group consisting of

(a) viral antigens, and the viral antigen is from a virus family selected from the group consisting of adenoviridae, herpesviridae, leviviridae, orthomyxoviridae, parvoviridae, filoviridae, hantaviridae, poxviridae, papillomaviridae, polyomaviridae, paramyxoviridae, pneumoviridae, picornaviridae, reoviridae, retroviridae, flaviviridae, hepadnaviridae, togaviridae, rhabdoviridae, arenaviridae, and coronaviridae;
(b) bacterial antigens, and the bacterial antigen is from a bacteria family selected from the group consisting of Aquaspirillum family, Azospirillum family, Azotobacteraceae family, Bacteroidaceae family, Bartonellaceae family, Bdellovibrio family, Campylobacteraceae family, Chlamydiaceae family, Clostridiaceae family, Enterobacteriaceae family, Gardinella family, Pasteurellaceae family, Halobacteriaceae family, Helicobacter family, Legionallaceae family, Listeriaceae family, Methylococcaceae family, mycobacteriaceae, Neisseriaceae family, Oceanospirillum family, Pasteurellaceae family, Streptococcaceae family, Pseudomonadaceae family, Rhizobiaceae family, Spirillum family, Spirosomaceae family, Staphylococcaceae family, Helicobacter family, Yersinia family, Bacillus antracis and Vampirovibrio family, and
(c) tumor neoantigens or neo-epitopes and tumor associated antigens; and the tumor associated antigen is selected from the group consisting of artificial fusion protein of HPV 16 E7 and E6 proteins, oncogenic viral antigens, cancer-testis antigens, oncofetal antigens, tissue differentiation antigens, mutant protein antigens, Adipophilin, AIM-2, ALDHIAI, BCLX (L), BING-4, CALCA, CD45, CPSF, cyclin DI, DKKI, ENAH (hMcna), Ga733 (EpCAM), EphA3, EZH2, FGF5, glypican-3, G250/MN/CAIX, HER-2/neu, IDOI, IGF2B3, IL13Ralpha2, Intestinal carboxyl esterase, alphafoetoprotein, Kallikrein 4, KIF20A, Lengsin, M-CSF, MCSP, mdm-2, Meloe, MMP-2, MMP-7, MUCl, MUC5AC, p53 (non-mutant), PAX5, PBF, PRAME, PSMA, RAGE, RAGE-I, RGS5, RhoC, RNF43, RU2AS, secernin 1, SOX10, STEAPI (six-transmembrane epithelial antigen of the prostate 1), survivin, Telomerase, VEGF, WT1, EGF-R, CEA, CD20, CD33, CD52, MELANA/MART1, MART2, NY-ESO-1, p53, MAGE Al, MAGE A3, MAGE-4, MAGE-5, MAGE-6, CDK4, alpha-actinin-4, ARTC1, BCR-ABL, BCR-ABL fusion protein (b3a2), B-RAF, CASP-5, CASP-8, beta-catenin, Cdc27, CDK4, CDKN2A, CLPP, COA-1, dek-can fusion protein, EFTUD2, Elongation factor 2, ETV6-AML, ETV6-AML1 fusion protein, FLT3-ITD, FNl, GPNMB, LDLR-fucosyltransferase fusion protein, NFYC, OGT, OS-9, pml-RARalpha fusion protein, PRDX5, PTPRK, H-ras, K-ras (V-Ki-ras2 Kirsten rat sarcoma viral oncogene), N-ras, RBAF600, SIRT2, SNRPDl, SSX, SSX2, SYT-SSX1 or -SSX2 fusion protein, TGFbetaRII, Triosephosphate isomerase, ormdm-2, LMP2, HPV E6, HPV E7, EGFRvIII (epidermal growth factor variant III), Idiotype, GD2, ganglioside G2), Ras-mutant, p53 (mutant), Proteinase3 (PRI), Tyrosinase, PSA, hTERT, Sarcoma translocation breakpoints, EphA2, prostatic acid phosphatase PAP, neo-PAP, ML-IAP, AFP, ERG (TMPRSS2 ETS Fusion gene), NAI 7, PAX3, ALK, Androgen Receptor, Cyclin B1, Polysialic acid, MYCN, TRP2, TRP2-Int2, GD3, Fucosyl GMI, Mesothelin, PSCA, sLe(a), cyp1B1, PLACI, GM3, BORIS, Tn, GLoboH, NY-BR-I, SART3, STn, Carbonic Anhydrase IX, OY-TESI, Sperm protein 17, LCK, high molecular weight melanoma-associated antigen (HMWMAA), AKAP-4, SSX2, XAGE 1, B7H3, Legumain, Tie 2, Page4, VEGFR2, MAD-CT-I, FAP, PDGFR-beta, MADCT-2, For-related antigen 1, TRPI, GP100, CA-125, CA19-9, Calretinin, Epithelial membrane antigen (EMA), Epithelial tumor antigen (ETA), CD19, CD34, CD99, CDI 17, Chromogranin, Cytokeratin, Desmin, Glial fibrillary acidic protein (GFAP), gross cystic disease fluid protein (GCDFP-15), HMB-45 antigen, Myo-D1, muscle-specific actin (MSA), neurofilament, neuronspecific enolase (NSE), placental alkaline phosphatase, synaptophysis, thyroglobulin, thyroid transcription factor-1, dimeric form of the pyruvate kinase isoenzyme type M2 (tumor M2-PK), BAGE BAGE-1, CAGE, CTAGE, FATE, GAGE, GAGE-I, GAGE-2, GAGE-3, GAGE-4, GAGE-5, GAGE-6, GAGE-7, HCA661, HOM-TES-85, MAGEA, MAGEB, MAGEC, NA88, NY-SAR-35, SPANXBI, SPAI 7, SSX, SYCP1, TPTE, Carbohydrate/ganglioside GM2 (oncofetal antigen-immunogenic-1 OFA-I-1), GM3, CA 15-3 (CA 27.29\BCAA), CA 195, CA 242, CA 50, CAM 43, CEA, EBNA, EF2, Epstein-Barr virus antigen, HLA-A2, HLA-Al 1, HSP70-2, KIAAO205, MUM-I, MUM-2, MUM-3, Myosin class I, GnTV, Herv-K-mel, LAGE-I, LAGE-2, (sperm protein) SPI 7, SCP-I, P15(58), Hom/Mel-40, E2A-PRL, H4-RET, IGH-IGK, MYL-RAR, TSP-180, P185erbB2, p180erbB-3, c-met, nm-23H1, TAG-72, TAG-72-4, CA-72-4, CAM 17.1, NuMa, 13-catenin, P16, TAGE, CT7, 43-9F, 5T4, 791Tgp72, 13HCG, BCA225, BTAA, CD68\KP1, CO-029, HTgp-175, M344, MG7-Ag, MOV18, NB\70K, NYCO-1, RCAS1, SDCCAG16, TA-90, TAAL6, TLP, TPS, CD22, CD27, CD30, CD70, prostein, TARP (T cell receptor gamma alternate reading frame protein), Trp-p8, integrin avβ3 (CD61), galactin, or Ral-B, CD123, CLL-1, CD38, CS-1, CD138, and ROR1.

[0137] In certain embodiments, the first mRNA transcript comprises a nucleotide sequence encoding the arenavirus GP signal peptide, either alone or fused to a heterologous non-arenaviral polypeptide. In certain embodiments, the second mRNA transcript comprises a nucleotide sequence encoding a heterologous non-arenaviral signal peptide and the arenavirus GP1 and GP2. In certain embodiments, the first mRNA transcript is under control of an arenavirus 3′ UTR and the second mRNA transcript is under control of an arenavirus 5′ UTR.

[0138] In certain embodiments, the first mRNA transcript comprises a nucleotide sequence encoding the arenavirus GP signal peptide, either alone or fused to a heterologous non-arenaviral polypeptide. In certain embodiments, the second mRNA transcript comprises a nucleotide sequence encoding a heterologous non-arenaviral polypeptide; wherein the heterologous non-arenaviral polypeptide encoded by the first mRNA transcript and the heterologous non-arenaviral polypeptide encoded by the second mRNA transcript are the same or different from each other. In certain embodiments, the first mRNA transcript is under control of an arenavirus 3′ UTR and the second mRNA transcript is under control of an arenavirus 5′ UTR.

[0139] In certain embodiments, the first mRNA transcript comprises a nucleotide sequence encoding a heterologous non-arenaviral signal peptide and the arenavirus GP1 and GP2. In certain embodiments, the second mRNA transcript comprises a nucleotide sequence encoding NP. In certain embodiments, the first mRNA transcript is under control of an arenavirus 5′ UTR and the second mRNA transcript is under control of an arenavirus 3′ UTR.

[0140] In certain embodiments, the expression level of the heterologous non-arenaviral polypeptide expressed under control of an arenavirus 3′ UTR or the expression level of the second heterologous non-arenaviral polypeptide expressed under control of an arenavirus 3′ UTR is at least about 1%, 2%, 3%, 4%, 5%, 6%, 7%, 8%, 9%, 10%, 15%, 20%, 30%, 40%, 50%, 60%, 70%, 80%, 90%, 100%, 1.5-fold, 2-fold, 3-fold, 4-fold, 5-fold, 6-fold, 7-fold, 8-fold, 9-fold, 10-fold, 12-fold, 15-fold, 18-fold, 20-fold, 25-fold, or 30-fold higher than the expression level of the same heterologous non-arenaviral polypeptide expressed under control of the respective arenavirus 5′ UTR or higher than the expression level of the same second heterologous non-arenaviral polypeptide expressed under control of the respective arenavirus 5′ UTR.

[0141] In certain embodiments, the expression of a first of the two heterologous non-arenaviral polypeptides is under control of an arenavirus 3′ UTR in a first S segment and the expression of a second of the two heterologous non-arenaviral polypeptides is under control of an arenavirus 5′ UTR in a second S segment, wherein the proportion of cells expressing both the two heterologous non-arenaviral polypeptides after the arenavirus particle infects a population of cells is at least about 1%, 2%, 3%, 4%, 5%, 6%, 7%, 8%, 9%, 10%, 15%, 20%, 30%, 40%, 50%, 60%, 70%, 80%, 90%, 100%, 1.5-fold, 2-fold, 3-fold, 4-fold, 5-fold, 6-fold, 7-fold, 8-fold, 9-fold, 10-fold, 12-fold, 15-fold, 18-fold, 20-fold, 25-fold, or 30-fold higher than the proportion of cells expressing both the same two heterologous non-arenaviral polypeptides after an arenavirus particle expressing the same two heterologous non-arenaviral polypeptides under control of arenavirus 5′ UTRs infects a comparable population of cells, and wherein the expression of a first of the same two heterologous non-arenaviral polypeptides is under control of an arenavirus 5′ UTR in a first S segment and the expression of a second of the same two heterologous non-arenaviral polypeptides is under control of an arenavirus 5′ UTR in a second S segment.

[0142] In certain embodiments, provided herein is a translation product of the arenavirus genomic or antigenomic segment provided herein.

[0143] In certain embodiments, provided herein is an arenavirus particle comprising the arenavirus genomic or antigenomic segment provided herein.

[0144] In certain embodiments, the genome of the arenavirus particle consists of an S segment and an L segment.

[0145] In certain embodiments, the arenavirus particle is tri-segmented. In certain embodiments, the tri-segmented arenavirus particle comprises two S segments and an L segment. In certain embodiments, the tri-segmented arenavirus particle comprises an S segment and two L segments.

[0146] In certain embodiments, the genome of the arenavirus particle consists of
[0147] a) an S segment that encodes arenavirus GP signal peptide and a heterologous non-arenaviral polypeptide or arenavirus GP signal peptide alone under the control of an arenavirus 3′ UTR and a heterologous non-arenaviral signal peptide, arenavirus GP1 and arenavirus GP2 under the control of an arenavirus 5′ UTR;
[0148] b) an S segment that encodes NP under the control of an arenavirus 3′ UTR and another heterologous non-arenaviral polypeptide or no polypeptide under the control of an arenavirus 5′ UTR; and
[0149] c) an L segment that encodes L protein under the control of an arenavirus 3′ UTR and Z protein under the control of an arenavirus 5′ UTR; and
   wherein the two heterologous non-arenaviral polypeptides are the same or different from each other.

[0150] In certain embodiments, the genome of the arenavirus particle consists of
[0151] a) an S segment that encodes arenavirus GP signal peptide and a heterologous non-arenaviral polypeptide or arenavirus GP signal peptide alone under the control of an arenavirus 3′ UTR and another heterologous non-arenaviral polypeptide or no polypeptide under the control of an arenavirus 5′ UTR;
[0152] b) an S segment that encodes NP under the control of an arenavirus 3′ UTR and a heterologous non-arenaviral signal peptide, arenavirus GP1 and arenavirus GP2 under the control of an arenavirus 5′ UTR; and
[0153] c) an L segment that encodes L protein under the control of an arenavirus 3′ UTR and Z protein under the control of an arenavirus 5′ UTR; and
   wherein the two heterologous non-arenaviral polypeptides are the same or different from each other.

[0154] In certain embodiments, the arenavirus particle is derived from a Lassa virus. In certain embodiments, the arenavirus particle is derived from a Lymphocytic choriomeningitis virus (LCMV). In certain embodiments, the LCMV is a MP strain, a WE strain, an Armstrong strain, or an Armstrong Clone 13 strain. In certain embodiments, the arenavirus particle is derived from a Pichinde virus (PICV). In certain embodiments, the arenavirus particle is derived from a Junin virus vaccine Candid #1, or a Junin virus vaccine XJ Clone 3 strain. In certain embodiments, the arenavirus particle is derived from an Oliveros virus. In certain embodiments, the arenavirus particle is derived from a Tamiami virus. In certain embodiments, the arenavirus particle is derived from a Mobala virus. In certain embodiments, the arenavirus particle is derived from a Mopeia virus. In certain embodiments, the arenavirus particle is derived from an Ippy virus. In certain embodiments, the arenavirus particle is derived from an Amapari virus. In certain embodiments, the arenavirus particle is derived from a Flexal virus. In certain embodiments, the arenavirus particle is derived from a Guanarito virus. In certain embodiments, the arenavirus particle is derived from a Latino virus. In certain embodiments, the arenavirus particle is derived from a Machupo virus. In certain embodiments, the arenavirus particle is derived from a Parana virus. In certain embodiments, the arenavirus particle is derived from a Pirital virus. In certain embodiments, the arenavirus particle is derived from a Sabia virus. In certain embodiments, the arenavirus particle is derived from a Tacaribe virus. In certain embodiments, the arenavirus particle is derived from a Bear Canyon virus. In certain embodiments, the arenavirus particle is derived from a Whitewater Arroyo virus. In certain embodiments, the arenavirus particle is derived from an Allpahuayo virus (ALLV). In certain embodiments, the arenavirus particle is derived from an Alxa virus. In certain embodiments, the arenavirus particle is derived from a Chapare virus. In certain embodiments, the arenavirus particle is derived from a Lijiang virus. In certain embodiments, the arenavirus particle is derived from a Cupixi virus. In certain embodiments, the arenavirus particle is derived from a Gairo virus. In certain embodiments, the arenavirus particle is derived from a Loei River virus. In certain embodiments, the arenavirus particle is derived from a Lujo virus. In certain embodiments, the arenavirus particle is derived from a Luna virus. In certain embodiments, the arenavirus particle is derived from a Luli virus. In certain embodiments, the arenavirus particle is derived from a Lunk virus. In certain embodiments, the arenavirus particle is derived from a Mariental virus. In certain embodiments, the arenavirus particle is derived from a Merino Walk virus. In certain embodiments, the arenavirus particle is derived from a Morogoro virus. In certain embodiments, the arenavirus particle is derived from an Okahandja virus. In certain embodiments, the arenavirus particle is derived from an Aporé virus. In certain embodiments, the arenavirus particle is derived from a Ryukyu virus. In certain embodiments, the arenavirus particle is derived from a Solwezi virus. In certain embodiments, the arenavirus particle is derived from a souris virus. In certain embodiments, the arenavirus particle is derived from a Wenzhou virus. In certain embodiments, the arenavirus particle is derived from a Big Brushy Tank virus. In certain embodiments, the arenavirus particle is derived from a Catarina virus. In certain embodiments, the arenavirus particle is derived from a Skinner Tank virus. In certain embodiments, the arenavirus particle is derived from a Tonto Creek virus. In certain embodiments, the arenavirus particle is derived from a Xapuri virus.

[0155] In certain embodiments, the genome of the arenavirus particle encodes the heterologous non-arenaviral polypeptide and/or the second heterologous non-arenaviral polypeptide, and the growth or infectivity of the arenavirus particle is not inferior to a second arenavirus particle, wherein the genome of the second arenavirus particle encodes the same heterologous non-arenaviral polypeptide and/or the same second heterologous non-arenaviral polypeptide; and wherein all arenaviral GP, NP, Z and L in the second arenavirus particle are each expressed as one ORF.

[0156] In certain embodiments, the arenavirus particle is infectious and replication competent. In certain embodiments, the arenavirus particle is attenuated as compared to its parental wild-type virus. In certain embodiments, the arenavirus particle is infectious but unable to produce further infectious progeny in non-complementing cells.

[0157] In certain embodiments, the titer of the arenavirus particle is at least about 1%, 2%, 3%, 4%, 5%, 6%, 7%, 8%, 9%, 10%, 15%, 20%, 30%, 40%, 50%, 60%, 70%, 80%, 90%, 100%, 1.5-fold, 2-fold, 3-fold, 4-fold, 5-fold, 6-fold, 7-fold, 8-fold, 9-fold, 10-fold, 12-fold, 15-fold, 18-fold, 20-fold, 25-fold, or 30-fold lower during a persistent infection in AGRAG mice than the titer of the respective wild-type parental arenavirus particle.

[0158] In certain embodiments, the arenavirus particle expresses a heterologous non-arenaviral polypeptide under control of an arenavirus 3′ UTR; wherein the arenavirus particle induces at least about 1%, 2%, 3%, 4%, 5%, 6%, 7%, 8%, 9%, 10%, 15%, 20%, 30%, 40%, 50%, 60%, 70%, 80%, 90%, 100%, 1.5-fold, 2-fold, 3-fold, 4-fold, 5-fold, 6-fold, 7-fold, 8-fold, 9-fold, 10-fold, 12-fold, 15-fold, 18-fold, 20-fold, 25-fold, or 30-fold higher immune responses against the heterologous non-arenaviral polypeptide in a subject after the arenavirus particle is administered to the subject as compared to after another arenavirus particle expressing the same heterologous non-arenaviral polypeptide under control of an arenavirus 5′ UTR is administered to the subject or to a comparable subject.

[0159] In certain embodiments, the arenavirus particle expresses two heterologous non-arenaviral polypeptides, wherein the expression of a first of the two heterologous non-arenaviral polypeptides is under control of an arenavirus 3′ UTR in a first S segment and the expression of a second of the two heterologous non-arenaviral polypeptides is under control of an arenavirus 5′ UTR in a second S segment, wherein the proportion of cells expressing both the two heterologous non-arenaviral polypeptides after the arenavirus particle infects a population of cells is at least about 1%, 2%, 3%, 4%, 5%, 6%, 7%, 8%, 9%, 10%, 15%, 20%, 30%, 40%, 50%, 60%, 70%, 80%, 90%, 100%, 1.5-fold, 2-fold, 3-fold, 4-fold, 5-fold, 6-fold, 7-fold, 8-fold, 9-fold, 10-fold, 12-fold, 15-fold, 18-fold, 20-fold, 25-fold, or 30-fold higher than the proportion of cells expressing both the same two heterologous non-arenaviral polypeptides after an arenavirus particle expressing the same two heterologous non-arenaviral polypeptides under control of arenavirus 5′ UTRs infects a comparable population of cells, and wherein the expression of a first of the same two heterologous non-arenaviral polypeptides is under control of an arenavirus 5′ UTR in a first S segment and the expression of a second of the same two heterologous non-arenaviral polypeptides is under control of an arenavirus 5′ UTR in a second S segment.

[0160] In certain embodiments, provided herein is a cDNA of the arenavirus genomic or antigenomic segment provided herein.

[0161] In certain embodiments, provided herein is a method of producing an arenavirus genomic or antigenomic segment, wherein the method comprises transcribing the cDNA provided herein.

[0162] In certain embodiments, provided herein is a method of generating an arenavirus particle, wherein the method comprises:
[0163] a) transfecting into a host cell one or more cDNA sequences of the arenavirus genomic or antigenomic segment provided herein or one or more RNA sequences each transcribed in vitro from the cDNA sequence of the arenavirus genomic or antigenomic segment provided herein;
[0164] b) transfecting into the host cell nucleotide sequences encoding arenavirus trans-acting factors;
[0165] c) maintaining the host cell under conditions suitable for virus formation; and
[0166] d) harvesting the arenavirus particle.

[0167] In certain embodiments, the one or more cDNA sequences are transcribed using a bidirectional promoter. In certain embodiments, the one or more cDNA sequences are transcribed under the control of a promoter selected from the group consisting of:
[0168] a) a RNA polymerase I promoter;
[0169] b) a RNA polymerase II promoter; and
[0170] c) a T7 promoter.

[0171] In certain embodiments, provided herein is a DNA expression vector comprising a DNA sequence encoding the arenavirus genomic or antigenomic segment provided herein.

[0172] In certain embodiments, provided herein is a method of rescuing an arenavirus particle using the arenavirus genomic or antigenomic segment provided herein or a DNA sequence encoding the arenavirus genomic or antigenomic segment.

[0173] In certain embodiments, provided herein is a host cell comprising the arenavirus genomic or antigenomic segment provided herein, the translation product provided herein, the arenavirus particle provided herein, or the DNA expression vector provided herein.

[0174] In certain embodiments, provided herein is a vaccine comprising the arenavirus genomic or antigenomic segment provided herein, the translation product provided herein, the arenavirus particle provided herein, or the DNA expression vector provided herein, and a pharmaceutically acceptable carrier.

[0175] In certain embodiments, provided herein is a pharmaceutical composition comprising the arenavirus genomic or antigenomic segment provided herein, the translation product provided herein, the arenavirus particle provided herein, or the DNA expression vector provided herein, and a pharmaceutically acceptable carrier.

### 3.4 Definitions

[0176] As used herein and unless otherwise indicated, the term “GP” means both the arenavirus glycoprotein and any arenavirus glycoprotein precursor. In an exemplary embodiment, the arenavirus glycoprotein precursor can be post-translationally cleaved into a signal peptide, GP1 and GP2. In certain embodiments, the arenavirus glycoprotein or any arenavirus glycoprotein precursor may be wild-type. In other embodiments, the arenavirus glycoprotein or any arenavirus glycoprotein precursor may be recombinant. GP is further described in Section 5.1.

[0177] As used herein and unless otherwise indicated, the term “NP” means both the arenavirus nucleoprotein and any arenavirus nucleoprotein precursor. In certain embodiments, the arenavirus nucleoprotein or any arenavirus nucleoprotein precursor may be wild-type. In other embodiments, the arenavirus nucleoprotein or any arenavirus nucleoprotein precursor may be recombinant. NP is further described in Section 5.1.

[0178] As used herein and unless otherwise indicated, the term “Z” means both the arenavirus Z protein and any arenavirus Z protein precursor. In certain embodiments, the arenavirus Z protein or any arenavirus Z protein precursor may be wild-type. In other embodiments, the arenavirus Z protein or any arenavirus Z protein precursor may be recombinant. Z is further described in Section 5.1.

[0179] As used herein and unless otherwise indicated, the term “L” means both the arenavirus L protein and any arenavirus L protein precursor. In certain embodiments, the arenavirus L protein or any arenavirus L protein precursor may be wild-type. In other embodiments, the arenavirus L protein or any arenavirus L protein precursor may be recombinant. L is further described in Section 5.1.

[0180] As used herein and unless otherwise indicated, the term “functional fragment” means a fragment of a polypeptide. The functional fragment of a polypeptide as described herein is not the full-length polypeptide. In certain embodiments, the functional fragment may possess one or more functions that is known to a person of ordinary skills in the art. In certain embodiments, the functional fragment may possess the biological functions of the polypeptide from which the functional fragment is derived. In an exemplary embodiment, the functional fragment may be a signal peptide that possesses a function of mediating the insertion of glycoprotein precursor into the membrane of the endoplasmic reticulum (ER). In further embodiments, besides the function of mediating the insertion of glycoprotein precursor into the membrane of the ER, the signal peptide may possess other functions, for example mediating cleavage of the polypeptide and/or acting as a trans-acting maturation factor. In other embodiments, the functional fragment may not possess any function that is known to a person of ordinary skills in the art. Functional fragment is further described in Section 5.2.

[0181] As used herein and unless otherwise indicated, the term “heterologous non-arenaviral polypeptide” means a polypeptide that is not of arenavirus origin. In certain embodiments, the heterologous non-arenaviral polypeptide is a reporter protein (see Section 5.3.1). In other embodiments, the heterologous non-arenaviral polypeptide is a signal peptide (see Section 5.3.2). In other embodiments, the heterologous non-arenaviral polypeptide is an antigen (see Section 5.3.3).

### 3.5 Conventions and Abbreviations

| Abbreviation | Convention |
|---|---|
| art | Artificial |
| CAT | Chloramphenicol acetyltransferase |
| CMI | cell-mediated immunity |
| CD8 | Cluster of differentiation 8 |
| CD4 | Cluster of differentiation 4 |
| ER | Endoplasmic reticulum |
| GFP | Green fluorescent protein |
| GP | Glycoprotein and precursors thereof |
| GP1 | Glycoprotein-1 subunit |
| GP2 | Glycoprotein-2 subunit |
| h.p. | heterologous non-arenaviral polypeptide |
| IGR | Intergenic region |
| JUNV | Junin virus |
| LCMV | Lymphocytic choriomeningitis virus |
| L | L protein and precursors thereof |
| L protein | RNA-dependent RNA polymerase |
| L segment | Long segment |
| MHC | Major Histocompatibility Complex |
| Z | Matrix protein Z and precursors thereof |
| Z protein | Matrix protein Z |
| nat | Natural |
| NP | Nucleoprotein and precursors thereof |
| ORF | Open reading frame |
| PICV | Pichinde virus |
| RFP | Red fluorescent protein |
| r2JUNV | Recombinant bi-segmented JUNV |
| r3JUNV | Recombinant tri-segmented JUNV |
| r2LCMV | Recombinant bi-segmented LCMV |
| r3LCMV | Recombinant tri-segmented LCMV |
| S segment | Short segment |
| S1P | Site 1 protease |
| SKI-1 | Subtilisin kexin isozyme-1 |
| SP | Signal peptide |
| TOM | Tomato (red fluorescent protein) |
| UTR | Untranslated region |
| VSV | Vesicular Stomatitis Virus |
| wt | Wild-type |
| ALLV | Allpahuayo virus |
| AMAV | Amapari virus |
| MOBV | Mobala virus |
| MOPV | Mopeia virus |
| FLEV | Flexal virus |
| GTOV | Guanarito virus |
| LATV | Latino virus |
| MACV | Machupo virus |
| BCNV | Bear Canyon virus |
| PARV | Parana virus |
| PIRV | Pirital virus |
| SABV | Sabia virus |
| TAMV | Tamiami virus |
| TCRV | Tacaribe virus |
| WWAV | Whitewater Arroyo virus |
| IPPV | Ippy virus |
| ALXV | Alxa virus |
| BCNV | Bear Canyon virus |
| SBAV | Sabiá virus |
| CHAPV | Chapare vims |
| LIJV | Lìjiāng virus |
| CUPXV | Cupixi virus |
| GAIV | Gairo virus |
| LORV | Loei River virus |
| LUJV | Lujo virus |
| LUAV | Luna virus |
| LULV | Luli virus |
| LNKV | Lunk virus |
| MRLV | Mariental virus |
| MRWV | Merino Walk virus |
| MORV | Morogoro virus |
| OKAV | Okahandja virus |
| PRAV | Paraná´virus |
| APOV | Aporé virus |
| RYKV | Ryukyu virus |
| SOLV | Solwezi virus |
| SOUV | souris virus |
| TMMV | Tamiami virus |
| WENV | Wēnzhōu virus |
| BBRTV | Big Brushy Tank virus |
| CTNV | Catarina virus |
| SKTV | Skinner Tank virus |
| TTCV | Tonto Creek virus |
| XAPV | Xapuri virus |

### 4. BRIEF DESCRIPTION OF THE FIGURES

[0183] FIGS. 1A-1G: Published tri-segmented arenavirus vector genome design strategies, and molecular mechanism underlying r3LCMV phenotypic reversion and genetic stability of artLCMV. FIGS. 1A-IE show the schematic of the RNA segments forming the genomes of wild type LCMV (FIG. 1A), r3LCMV (FIG. 1B), artLCMV (FIG. 1C), r3LCMVrev (FIG. 1D) and artLCMVrev (FIG. 1E). Segment denominations are boxed and indicated in bold. UTR: untranslated region; IGR: intergenic region; ORFs are indicated by arrows. GPC: full-length glycoprotein ORF (including the natural signal peptide); NP: nucleoprotein; L: RNA-dependent RNA polymerase L; Z: Matrix protein; h.p.: heterologous non-arenaviral polypeptide. FIG. 1F shows a non-homologous inter-segmental RNA recombination event re-uniting NP and GPC on one RNA segment (Kallert S M, et al. (2017) Nat Commun 8, 15327). This process underlies the spontaneous reversion of r3LCMV to a bi-segmented viral genome with wildtype-like virulence. FIG. 1G shows a hypothetical recombination event in artLCMV reuniting GPC and NP on one single RNA segment, which is devoid of a 5′ UTR and thus lacks a functional viral promoter (Kallert S M, et al. (2017) Nat Commun 8, 15327).

[0184] FIG. 2: Characteristics of published tri-segmented arenavirus vector genome design strategies. Comparison of r3LCMV and r3LCMVrev in terms of cell culture growth, genetic stability and transgene expression levels from their S_{GP} segments. Superscript numbers refer to the published evidence for the rating. Genetic stability has not been tested for all vector design strategies (“untested”).

[0185] FIGS. 3A-3B: Domain structure of arenavirus glycoproteins, and strategy to segregate the signal peptide from the GP1 and GP2 domains into separate viral transcriptional units. FIG. 3A shows the schematic of the arenavirus glycoprotein (GPC), which is composed of a signal peptide (SP), the GP1 domain (outer globular receptor binding domain on the virion's glycoprotein complex) and the GP2 transmembrane stalk domain. Signal peptidase cleaves off the signal peptide concomitantly with polypeptide synthesis, whereas SKI-1/SIP (“S1P”) cuts post-translationally between GP1 and GP2, rendering the glycoprotein complex biologically active. FIG. 3B shows the segregation of the arenavirus GP signal peptide (SP) into one transcriptional unit (with the possibility of adding downstream in-frame with SP a heterologous non-arenaviral polypeptide (h.p.) of interest, which will be cleaved off from SP by signal peptidase concomitantly with translation by the ribosome), and GP1/GP2 into another separate transcriptional unit, where GP1/GP2 are expressed with an upstream heterologous non-arenaviral signal peptide for ER insertion.

[0186] FIGS. 4A-4F: Genome organization of Split-A, Split-B, Split-C, Split-D, Split-E and Split-F vector genomes and their X and Y variants. FIGS. 4A-4F shows the schematic description of the genome organizations of Split-A (FIG. 4A), Split-B (FIG. 4B), Split-C (FIG. 4C), Split-D (FIG. 4D), Split-E (FIG. 4E) and Split-F (FIG. 4F) vector genomes, each expressing two heterologous non-arenaviral polypeptides (“h.p.”), which may be the same or different from each other. X and Y variants (Split-Ax, Split-Ay, Split-Bx, Split-By etc.) carrying a transgene at only one of two possible sites are described for each one of the genome organizations displayed in FIGS. 4A-4F.

[0187] FIG. 5: DNA plasmid expression cassettes were used to generate by transient transfection infectious LCMV-based and Junin Candid #1-based Split-A, Split-C, Split-E, Split-F vectors, respectively, as well as artLCMV and artCAND vectors. The arenavirus RNA genome segments were transcribed from polymerase-I-driven expression cassettes (Pol-I-L, Pol-I-S1, Pol-I-S2) consisting of an upstream polymerase-I promoter (pol-I-P) and a downstream polymerase-I terminator (pol-I-T) flanking a cDNA of the viral segment of interest including its 5′ non-templated G (“G”). The viral segments contain elements as outlined in the legend to FIGS. 1A-1G. The minimal viral trans-acting factors NP and L were expressed from the plasmids denominated pC-NP and pC-L, which comprise an actin promoter (Act-P.) with CMV-enhancer (CMV-Enh.) with an artificial downstream intron, followed by a cDNA of the viral NP or L protein, respectively, and a polyadenylation site (poly-A).

[0188] FIGS. 6A-6E: Comparison of the cell culture growth of artLCMV and LCMV-based Split-A, Split-C, Split-E and Split-F vectors. LCMV-GP expressing BHK-21 cells (Flatz L, et al. Nat Med 2010; 16, 339-345) were transfected with plasmids as described in FIG. 5 to generate vectors containing genomes as depicted in FIGS. 6A-6B. Replication-competent vector titers on 3T3 cells were determined 6 days after transfection by immunofocus assay. Normal BHK-21 cells (not expressing LCMV-GP) were infected at MOI=0.01 with viral vectors and supernatants were collected after 48 hours (FIG. 6C). Infectious titers were determined on 3T3 cells by immunofocus assay based on the result from 1 (FIG. 6B and FIG. 6C) or the mean of two (FIG. 6A) cell culture wells. 293F suspension cells (not expressing LCMV-GP) were infected at MOI=0.001 with viral vectors, supernatants were collected at the indicated time points (e.g., 24 hrs, 48 hrs, 72 hrs, 96 hrs, or 120 hrs), and infectious titers were determined in the supernatant by immunofocus assay on 3T3 cells (FIG. 6D). The supernatants collected at 48h (FIG. 6D) were used to determine LCMV NP-expressing infectious titers by immunofocus assay. GP-pseudotyping 293T-GP cells or 3T3 cells were used as cell substrates (the values from the 3T3 cells are depicted in FIG. 6D). The ratio of 293T-GP:3T3 titer was calculated for each vector (artLCMV, Split-C and Split-E) as a surrogate of the proportion of particles packaging all three genomic segments (FIG. 6E). Black circles represent independent values from triplicate cell culture wells, bars show means+/−standard deviation.

[0189] FIG. 7: Comparison of GFP expression from Split-C(TOM/GFP) and artLCMV(TOM/GFP) vectors by fluorescence microscopy. BHK-21 cells were infected with Split-C(TOM/GFP) or artLCMV (TOM/GFP). Alternatively, some BHK-21 cells were not infected (“no virus”). 24 hours after infection, green fluorescence was visualized by fluorescence microscopy (FIG. 7).

[0190] FIGS. 8A-8E: Comparison of GFP and TOM expression from Split-C(TOM/GFP) and artLCMV(TOM/GFP) vectors by flow cytometry. BHK-21 cells were infected with Split-C(TOM/GFP) or artLCMV(TOM/GFP) as schematically depicted in FIG. 8A or left uninfected (“no virus”; same experiment as in FIG. 7). 32 hours after infection, the cells were analyzed using flow cytometric analysis of GFP and TOM expression. A distinct population of cells infected with Split-C(TOM/GFP), artLCMV(TOM/GFP), and GFP-expressing cells were gated for further analysis (FIG. 8B). Non-fluorescent un-infected cells were gated for comparison (FIG. 8B). Graph showing GFP and TOM fluorescence of cells as gated in FIG. 8B is shown in FIG. 8C. The geometric mean fluorescence intensity of the three cell populations in the GFP and TOM channels, respectively, is indicated. FIGS. 8D-8E show a comparison of GFP and TOM co-expression from Split-C(TOM/GFP), artLCMV(TOM/GFP) and artLCMV(GFP/TOM) vectors by flow cytometry. BHK-21 cells were infected with Split-C(TOM/GFP), artLCMV(TOM/GFP) or artLCMV(GFP/TOM), the genomes of which are schematically depicted in FIG. 8D, at a multiplicity of infection of 0.1 (MOI=0.1). 24 hours after infection, cells were processed for flow cytometric analysis of GFP and TOM expression (FIG. 8E). The percentage of cells exhibiting GFP and/or TOM fluorescence is indicated in the respective quadrants (FIG. 8E).

[0191] FIGS. 9A-9C: Genetic stability of LCMV-based Split-C vector but not of r3LCMV in persistently infected AGRAG mice. AGRAG mice were infected intravenously with 10e5 PFU of either an LCMV-based Split-C vector (expressing GFP and TOM, same vector as in FIG. 7 and FIGS. 8A-8E) or with r3LCMV(GFP) as described in Kallert et al. (Kallert S M, et al. (2017) Nat Commun 8, 15327), or with a bi-segmented wildtype LCMV (genome organization depicted in FIG. 1A) based on the Clone 13 backbone and expressing the WE strain glycoprotein. On the indicated time points, blood was collected to determine viral infectivity by detecting either the viral NP (as a measure of total infectivity, FIG. 9A) or the GFP transgene (as a measure of transgene-expressing infectivity, FIG. 9B). The ratio of NP:GFP infectivity was then calculated (FIG. 9C). FIGS. 9D-9F: Genetic stability of LCMV-based Split-C and artLCMV vectors but not of r3LCMV in persistently infected AGRAG mice. AGRAG mice were infected intravenously with 10e5 PFU of either i) an LCMV-based Split-C vector expressing GFP (Split-C(GFP)), ii) artLCMV(GFP), iii) r3LCMV(GFP) (as described in Kallert et al. (Kallert S M, et al. (2017) Nat Commun 8, 15327), or iv) with a bi-segmented wildtype LCMV (genome organization depicted in FIG. 1A based on the Clone 13 backbone and expressing the WE strain glycoprotein. On the indicated time points, blood was collected to determine viral infectivity by detecting either the viral NP (as a measure of total infectivity, FIG. 9D) or the GFP transgene (as a measure of transgene-expressing infectivity, FIG. 9E). The ratio of NP:GFP infectivity was then calculated (FIG. 9F). Symbols represent the mean+/−SEM of initially three (LCMVwt), five (r3LCMV(GFP)), four (artLCMV(GFP)), and six (Split-C) animals.

[0192] FIGS. 10A-10D: Immunogenicity of a cancer-testis antigen expressed from an LCMV-based Split-C vector's S1 segment in comparison to the S_{GP} segment of artLCMV. BALB/c mice were immunized with 5×10e5 PFU of either an LCMV-based Split-C vector expressing GFP and the cancer-testis antigen P1A or with an artLCMV vector delivering the same transgenes (i.e., cancer-testis antigen P1A). The respective vector genomes are depicted in FIG. 10A. Nine days after immunization, CD8+ T cell responses were determined in peripheral blood using MHC class I tetramers (H-2Ld) loaded with the LPYLGWLVF (SEQ ID NO: 43) peptide epitope derived from P1A (FIG. 10B) or with the immunodominant NP-derived backbone epitope RPQASGVYM (SEQ ID NO: 44) (NP118, FIG. 10C). The ratio of P1A:NP118 specific CD8+ T cells was calculated for each mouse as a measure of transgene immunodominance (FIG. 10D). Statistical significance was determined using unpaired two-tailed student's t tests. **: p<0.01, n.s.: p>0.05.

[0193] FIGS. 11A-11N: Immunogenicity of artificial HPV16 E7E6 fusion antigen expressed from an LCMV-based Split-C vector's S1 segment in comparison to the S_{GP} segment of artLCMV. C57BL/6 mice were immunized with 10e5 PFU of either an LCMV-based Split-C vector expressing GFP and an artificial HPV16 E7E6 fusion antigen or with an artLCMV vector delivering the same transgenes (i.e., GFP and artificial HPV16 E7E6 fusion antigen). The respective vector genomes are depicted in FIG. 11A. Control mice were left unimmunized (“none”). Eight days after immunization, CD8+ T cell responses were determined in peripheral blood and 22 days after immunization, CD8+ T cell responses were determined in the spleen. This experiment used MHC class I dextramers (H-2db) loaded with the RAHYNIVTF (SEQ ID NO: 45) peptide epitope derived from the HPV16 E7 protein (E7-Dex, FIGS. 11B, 11E, 11H, and 11J-11N) or with the immunodominant NP-derived backbone epitope FQPQNGQFI (SEQ ID NO: 46) (NP396-Tet, FIGS. 11C, 11F, and 11I). The ratio of P1A:NP118 specific CD8+ T cells was calculated as a measure of transgene immunodominance (FIG. 11D and FIG. 11G). E7-Dex+ and NP396-Tet+ cell frequencies are expressed as a percentage of CD8+B220− cells (FIGS. 11B, 11C, 11E, and 11F). Absolute numbers of E7-Dex+ or NP396−Tet+CD8+B220− cells per spleen are shown in FIG. 11H and FIG. 11I). Subsets of E7-Dex+CD8+B220− cells expressing the indicated markers are enumerated in FIGS. 11J-11N). Statistical significance was determined using unpaired two-tailed student's t tests. **: p<0.01, *: p<0.05, n.s.: p>0.05.

[0194] FIGS. 12A-12C: Assessment of cell culture growth of Split-C-CAND vectors. LCMV-GP expressing BHK-21 cells (Flatz L, et al. Nat Med 2010; 16, 339-345) were transfected with plasmids as described in FIG. 5 to generate Split-C-CAND(TOM/GFP) and Split-C-CAND(TOM/E7E6) vectors containing genomes as depicted in FIGS. 12A-12B. Five days after transfection, supernatants were blindly passaged on normal 293T cells (not expressing LCMV-GP). Culture supernatants were collected 2, 7 and 9 days after inoculation, and replication-competent vector titers were determined on 3T3 cells (FIG. 12C).

[0195] FIGS. 13A-13D: Comparison of GFP and TOM expression from Split-C-CAND(TOM/GFP) and artCAND(TOM/GFP) vectors by flow cytometry. 293T cells were infected with Split-C-CAND(TOM/GFP) or artCAND(TOM/GFP) as schematically depicted in FIG. 13A or left uninfected (“no virus”). 72 hours after infection, the cells were analyzed for GFP and TOM expression using flow cytometry (FIGS. 13B-13D). A distinct population of cells expressing GFP (FIG. 13C) or TOM (FIG. 13D) was detected in Split-C-CAND(TOM/GFP)- and artLCAND(TOM/GFP)-infected but not in uninfected control cell cultures, when plotting GFP and TOM against sideward scatter (SSC-H; FIGS. 13C-13D). The GFP mean fluorescence intensity (MFI; FIG. 13C) and TOM MFI (FIG. 13D) of virus-infected cultures are indicated.

[0196] FIGS. 14A-14D: Immunogenicity of an artificial HPV16 E7E6 fusion antigen expressed from a CAND-based Split-C vector's S1 segment in comparison to the S_{GP} segment of artCAND. C57BL/6 mice were immunized with 2×10e5 FFU of either an CAND-based Split-C vector (Split-C-CAND(TOM/E7E6)) expressing TOM and an artificial fusion antigen consisting of the E7 and E6 proteins of HPV16 (Cassetti et al. Vaccine 2004; 3-4, 520-527) or with an artCAND vector (artCAND(TOM/E7E6)) delivering the same transgenes (i.e., TOM and E7E6). The respective vector genomes are depicted in FIG. 14A. Nine days after immunization, CD8+ T cell responses were determined in peripheral blood using MHC class I dextramers (H-2db) loaded with the RAHYNIVTF (SEQ ID NO: 45) peptide epitope derived from the HPV16 E7 protein (E7-Dex, FIG. 14B) and MHC class I tetramers (H-2Kb) loaded with the NP-derived backbone epitope YTVKYPNL (SEQ ID NO: 47) (NP205, FIG. 14C). The ratio of E7:NP205 specific CD8+ T cells was calculated for each mouse as a measure of transgene immunodominance (FIG. 14D). Statistical significance was determined using unpaired two-tailed student's t tests. **: p<0.01, n.s.: p>0.05.

### 5. DETAILED DESCRIPTION OF THE INVENTION

[0197] Provided herein are arenavirus particles that are genetically stable and provide a high-level transgene expression. In certain embodiments, the arenavirus particles are tri-segmented. Also provided herein are nucleotide sequences and arenavirus genomic or antigenomic segments related to such arenavirus particles. In certain embodiments, provided herein is a nucleotide sequence (see Section 5.4) comprising one or more ORFs comprising a nucleotide sequence encoding a functional fragment (see Section 5.2) of arenavirus GP, NP, L or Z (see Section 5.1) and/or a heterologous non-arenaviral polypeptide (see Section 5.3). In certain embodiments, provided herein is an arenavirus particle engineered such that an arenaviral ORF is separated over two or more mRNA transcripts (see Section 5.5). In certain embodiments, provided herein is an arenavirus genomic or antigenomic segment engineered such that the transcription thereof results in one or more mRNA transcripts comprising a nucleotide sequence encoding a functional fragment of arenavirus GP, NP, L or Z (see Section 5.6). In certain embodiments, the arenavirus particles provided herein are genetically stable, i.e. do not revert to wild-type-like (more virulent) replication behavior in the host (genetic stability) (see Section 5.13). In certain embodiments, the arenavirus particles provided herein may show high-level transgene expression to elicit strong immune responses against the desired target antigen(s) (transgene expression levels) (see Section 5.13). In certain embodiments, the arenavirus particles provided herein may show good growth in cell culture, enabling the arenavirus particle's production to high titers in industrial fermentation processes (production yields) (see Section 5.13). In certain embodiments, the arenavirus particles provided herein may be suitable for vaccines, treatment of diseases, and/or for the use in immunotherapies (see Sections 5.11 and 5.12).

[0198] Arenaviruses for use with the methods and compositions provided herein can be Old World viruses such as, for example, Lassa virus, Lymphocytic choriomeningitis virus (LCMV), Mobala virus, Mopeia virus, or Ippy virus, or New World viruses such as, for example, Amapari virus, Flexal virus, Guanarito virus, Junin virus, Latino virus, Machupo virus, Oliveros virus, Parana virus, Pichinde virus, Pirital virus, Sabia virus, Tacaribe virus, Tamiami virus, Bear Canyon virus, Allpahuayo virus (ALLV), or Whitewater Arroyo virus. Arenaviruses for use with the methods and compositions provided herein can be, for example, arenaviruses, mammarenaviruses, Old World mammarenaviruses, New World mammarenaviruses, New World mammarenaviruses of Clade A, New World mammarenaviruses of Clade B, New World mammarenaviruses of Clade C, or New World mammarenaviruses of Clade D. Arenaviruses for use with the methods and compositions provided herein can be a mammarenavirus including, but not limited to, Allpahuayo virus, Alxa virus, Junin virus, Bear Canyon virus, Sabia virus, Pichinde virus, Chapare virus, Lijiang virus, Cupixi virus, Flexal virus, Gairo virus, Guanarito virus, Ippy virus, Lassa virus, Latino virus, Loei River virus, Lujo virus, Luna virus, Luli virus, Lunk virus, lymphocytic choriomeningitis virus, Machupo virus, Mariental virus, Merino Walk virus, Mobala virus, Mopeia virus, Morogoro virus, Okahandja virus, Oliveros virus, Parana virus, Pirital virus, Aporé virus, Ryukyu virus, Amapari virus, Solwezi virus, souris virus, Tacaribe virus, Tamiami virus, Wenzhou virus, Whitewater Arroyo virus, Big Brushy Tank virus, Catarina virus, Skinner Tank virus, Tonto Creek virus, or Xapuri virus.

5.1 Polypeptide Selected from the Group Consisting of Arenavirus GP, NP, Z and L

[0199] In certain embodiments, provided herein is a nucleotide sequence comprising one or more ORFs comprising a nucleotide sequence encoding a functional fragment of a polypeptide. In certain embodiments, provided herein is an arenavirus genomic or antigenomic segment engineered such that transcription thereof results in one or more mRNA transcripts comprising a nucleotide sequence encoding a functional fragment of a polypeptide. In certain embodiments, the polypeptide as described herein is selected from the group consisting of arenavirus GP, NP, Z, and L, namely from the group consisting of arenavirus glycoprotein, nucleoprotein, Z protein, L protein, glycoprotein precursor, nucleoprotein precursor, Z protein precursor, and L protein precursor. In certain embodiments, the arenavirus GP, NP, Z, and L are wild-type. In other embodiments, the arenavirus GP, NP, Z, and L are recombinant. In certain embodiments, the arenavirus GP, NP, Z, and L are mutated. In certain embodiments, the arenavirus GP, NP, Z, and L are derived from an attenuated virus.

[0200] In certain embodiments, the polypeptide described herein is selected from the group consisting of wild-type arenavirus glycoprotein, nucleoprotein, Z protein, L protein, glycoprotein precursor, nucleoprotein precursor, Z protein precursor, and L protein precursor. In certain embodiments, the polypeptide described herein is a wild-type arenavirus glycoprotein precursor. In certain embodiments, the wild-type arenavirus glycoprotein precursor can be processed into a GP signal peptide, a GP1 and a GP2.

[0201] In certain embodiments, the polypeptide described herein is selected from the group consisting of recombinant arenavirus glycoprotein, nucleoprotein, Z protein, L protein, glycoprotein precursor, nucleoprotein precursor, Z protein precursor, and L protein precursor. In certain embodiments, the polypeptide described herein is a recombinant arenavirus glycoprotein precursor. In certain embodiments, the recombinant arenavirus glycoprotein precursor can be processed into a GP signal peptide, a GP1 and a GP2, one or more of which are recombinant.

[0202] In certain embodiments, the polypeptide described herein is selected from the group consisting of mutated arenavirus glycoprotein, nucleoprotein, Z protein, L protein, glycoprotein precursor, nucleoprotein precursor, Z protein precursor, and L protein precursor. In certain embodiments, the polypeptide described herein is a mutated arenavirus glycoprotein precursor. In certain embodiments, the mutated arenavirus glycoprotein precursor can be processed into a GP signal peptide, a GP1 and a GP2, one or more of which are mutated.

[0203] In certain embodiments, the polypeptide described herein is selected from the group consisting of arenavirus glycoprotein, nucleoprotein, Z protein, L protein, glycoprotein precursor, nucleoprotein precursor, Z protein precursor, and L protein precursor that are derived from an attenuated virus. In certain embodiments, the polypeptide described herein is an arenavirus glycoprotein precursor derived from an attenuated virus. In certain embodiments, the arenavirus glycoprotein precursor can be processed into a GP signal peptide, a GP1 and a GP2, one or more of which are derived from an attenuated virus.

[0204] In certain embodiments, the polypeptide described herein is selected from the group consisting of GP, NP, Z and L of LCMV, Lassa virus, Pichinde virus, Oliveros virus, Tamiami virus, Mobala virus, Mopeia virus, Ippy virus, Amapari virus, Flexal virus, Guanarito virus, Latino virus, Machupo virus, Parana virus, Pirital virus, Sabia virus, Tacaribe virus, Bear Canyon virus, Whitewater Arroyo virus, Allpahuayo virus (ALLV), Alxa virus, Chapare virus, Lijiang virus, Cupixi virus, Gairo virus, Loei River virus, Lujo virus, Luna virus, Luli virus, Lunk virus, Mariental virus, Merino Walk virus, Morogoro virus, Okahandja virus, Aporé virus, Ryukyu virus, Solwezi virus, souris virus, Wenzhou virus, Big Brushy Tank virus, Catarina virus, Skinner Tank virus, Tonto Creek virus, Xapuri virus, or Junin virus.

[0205] In certain embodiments, the polypeptide described herein comprises an amino acid sequence that is at least 80%, 85%, 90%, 95%, 96%, 97%, 98%, 99% or 100% identical to the amino acid sequence of SEQ ID NO:1, SEQ ID NO:2, SEQ ID NO:3, SEQ ID NO:4, SEQ ID NO:5, SEQ ID NO:6, SEQ ID NO:7, SEQ ID NO:8, SEQ ID NO:9, SEQ ID NO:10, SEQ ID NO:11, SEQ ID NO:12, SEQ ID NO:13, SEQ ID NO:14, SEQ ID NO:15, SEQ ID NO:16, SEQ ID NO:17, SEQ ID NO:18, SEQ ID NO:19, SEQ ID NO:20, SEQ ID NO:21, SEQ ID NO:22, SEQ ID NO:23, SEQ ID NO:24, SEQ ID NO:48, SEQ ID NO:52, SEQ ID NO:59, SEQ ID NO:66, SEQ ID NO:73, SEQ ID NO:80, SEQ ID NO:84, SEQ ID NO:91, SEQ ID NO:98, SEQ ID NO:105, SEQ ID NO:109, SEQ ID NO: 113, SEQ ID NO:120, SEQ ID NO:127, SEQ ID NO:134, SEQ ID NO:49, SEQ ID NO:56, SEQ ID NO:63, SEQ ID NO:70, SEQ ID NO:77, SEQ ID NO:81, SEQ ID NO:88, SEQ ID NO:95, SEQ ID NO:102, SEQ ID NO:106, SEQ ID NO:110, SEQ ID NO:117, SEQ ID NO:124, SEQ ID NO:131, SEQ ID NO:138, SEQ ID NO:50, SEQ ID NO:57, SEQ ID NO:64, SEQ ID NO:71, SEQ ID NO:78, SEQ ID NO:82, SEQ ID NO:89, SEQ ID NO:96, SEQ ID NO:103, SEQ ID NO:107, SEQ ID NO:111, SEQ ID NO: 118, SEQ ID NO:125, SEQ ID NO:132, SEQ ID NO:139, SEQ ID NO:51, SEQ ID NO:58, SEQ ID NO:65, SEQ ID NO:72, SEQ ID NO:79, SEQ ID NO:83, SEQ ID NO:90, SEQ ID NO:97, SEQ ID NO:104, SEQ ID NO:108, SEQ ID NO: 112, SEQ ID NO: 119, SEQ ID NO:126, SEQ ID NO:133, or SEQ ID NO:140. In certain embodiments, the polypeptide described herein comprises an amino acid sequence that is at least 80% identical to the amino acid sequence of SEQ ID NO:1, SEQ ID NO:2, SEQ ID NO:3, SEQ ID NO:4, SEQ ID NO:5, SEQ ID NO:6, SEQ ID NO:7, SEQ ID NO:8, SEQ ID NO:9, SEQ ID NO:10, SEQ ID NO: 11, SEQ ID NO:12, SEQ ID NO:13, SEQ ID NO:14, SEQ ID NO:15, SEQ ID NO:16, SEQ ID NO:17, SEQ ID NO:18, SEQ ID NO:19, SEQ ID NO:20, SEQ ID NO:21, SEQ ID NO:22, SEQ ID NO:23, SEQ ID NO:24, SEQ ID NO:48, SEQ ID NO:52, SEQ ID NO:59, SEQ ID NO:66, SEQ ID NO:73, SEQ ID NO:80, SEQ ID NO:84, SEQ ID NO:91, SEQ ID NO:98, SEQ ID NO:105, SEQ ID NO:109, SEQ ID NO:113, SEQ ID NO:120, SEQ ID NO:127, SEQ ID NO:134, SEQ ID NO:49, SEQ ID NO:56, SEQ ID NO:63, SEQ ID NO:70, SEQ ID NO:77, SEQ ID NO:81, SEQ ID NO:88, SEQ ID NO:95, SEQ ID NO:102, SEQ ID NO:106, SEQ ID NO:110, SEQ ID NO: 117, SEQ ID NO:124, SEQ ID NO:131, SEQ ID NO:138, SEQ ID NO:50, SEQ ID NO:57, SEQ ID NO:64, SEQ ID NO:71, SEQ ID NO:78, SEQ ID NO:82, SEQ ID NO:89, SEQ ID NO:96, SEQ ID NO:103, SEQ ID NO:107, SEQ ID NO:111, SEQ ID NO: 118, SEQ ID NO:125, SEQ ID NO:132, SEQ ID NO:139, SEQ ID NO:51, SEQ ID NO:58, SEQ ID NO:65, SEQ ID NO:72, SEQ ID NO:79, SEQ ID NO:83, SEQ ID NO:90, SEQ ID NO:97, SEQ ID NO:104, SEQ ID NO:108, SEQ ID NO: 112, SEQ ID NO: 119, SEQ ID NO:126, SEQ ID NO:133, or SEQ ID NO:140. In certain embodiments, the polypeptide described herein comprises an amino acid sequence that is at least 85% identical to the amino acid sequence of SEQ ID NO:1, SEQ ID NO:2, SEQ ID NO:3, SEQ ID NO:4, SEQ ID NO:5, SEQ ID NO:6, SEQ ID NO:7, SEQ ID NO:8, SEQ ID NO:9, SEQ ID NO:10, SEQ ID NO:11, SEQ ID NO:12, SEQ ID NO:13, SEQ ID NO:14, SEQ ID NO:15, SEQ ID NO:16, SEQ ID NO:17, SEQ ID NO:18, SEQ ID NO:19, SEQ ID NO:20, SEQ ID NO:21, SEQ ID NO:22, SEQ ID NO:23, SEQ ID NO:24, SEQ ID NO:48, SEQ ID NO:52, SEQ ID NO:59, SEQ ID NO:66, SEQ ID NO:73, SEQ ID NO:80, SEQ ID NO:84, SEQ ID NO:91, SEQ ID NO:98, SEQ ID NO:105, SEQ ID NO:109, SEQ ID NO: 113, SEQ ID NO:120, SEQ ID NO:127, SEQ ID NO:134, SEQ ID NO:49, SEQ ID NO:56, SEQ ID NO:63, SEQ ID NO:70, SEQ ID NO:77, SEQ ID NO:81, SEQ ID NO:88, SEQ ID NO:95, SEQ ID NO:102, SEQ ID NO:106, SEQ ID NO:110, SEQ ID NO: 117, SEQ ID NO:124, SEQ ID NO:131, SEQ ID NO:138, SEQ ID NO:50, SEQ ID NO:57, SEQ ID NO:64, SEQ ID NO:71, SEQ ID NO:78, SEQ ID NO:82, SEQ ID NO:89, SEQ ID NO:96, SEQ ID NO:103, SEQ ID NO:107, SEQ ID NO:111, SEQ ID NO: 118, SEQ ID NO:125, SEQ ID NO:132, SEQ ID NO:139, SEQ ID NO:51, SEQ ID NO:58, SEQ ID NO:65, SEQ ID NO:72, SEQ ID NO:79, SEQ ID NO:83, SEQ ID NO:90, SEQ ID NO:97, SEQ ID NO:104, SEQ ID NO:108, SEQ ID NO: 112, SEQ ID NO: 119, SEQ ID NO:126, SEQ ID NO:133, or SEQ ID NO:140. In certain embodiments, the polypeptide described herein comprises an amino acid sequence that is at least 90% identical to the amino acid sequence of SEQ ID NO:1, SEQ ID NO:2, SEQ ID NO:3, SEQ ID NO:4, SEQ ID NO:5, SEQ ID NO:6, SEQ ID NO:7, SEQ ID NO:8, SEQ ID NO:9, SEQ ID NO:10, SEQ ID NO: 11, SEQ ID NO:12, SEQ ID NO:13, SEQ ID NO:14, SEQ ID NO:15, SEQ ID NO:16, SEQ ID NO:17, SEQ ID NO:18, SEQ ID NO:19, SEQ ID NO:20, SEQ ID NO:21, SEQ ID NO:22, SEQ ID NO:23, SEQ ID NO:24, SEQ ID NO:48, SEQ ID NO:52, SEQ ID NO:59, SEQ ID NO:66, SEQ ID NO:73, SEQ ID NO:80, SEQ ID NO:84, SEQ ID NO:91, SEQ ID NO:98, SEQ ID NO:105, SEQ ID NO:109, SEQ ID NO:113, SEQ ID NO:120, SEQ ID NO:127, SEQ ID NO:134, SEQ ID NO:49, SEQ ID NO:56, SEQ ID NO:63, SEQ ID NO:70, SEQ ID NO:77, SEQ ID NO:81, SEQ ID NO:88, SEQ ID NO:95, SEQ ID NO:102, SEQ ID NO:106, SEQ ID NO:110, SEQ ID NO:117, SEQ ID NO:124, SEQ ID NO:131, SEQ ID NO:138, SEQ ID NO:50, SEQ ID NO:57, SEQ ID NO:64, SEQ ID NO:71, SEQ ID NO:78, SEQ ID NO:82, SEQ ID NO:89, SEQ ID NO:96, SEQ ID NO:103, SEQ ID NO:107, SEQ ID NO:111, SEQ ID NO: 118, SEQ ID NO:125, SEQ ID NO:132, SEQ ID NO:139, SEQ ID NO:51, SEQ ID NO:58, SEQ ID NO:65, SEQ ID NO:72, SEQ ID NO:79, SEQ ID NO:83, SEQ ID NO:90, SEQ ID NO:97, SEQ ID NO:104, SEQ ID NO:108, SEQ ID NO:112, SEQ ID NO:119, SEQ ID NO:126, SEQ ID NO:133, or SEQ ID NO:140. In certain embodiments, the polypeptide described herein comprises an amino acid sequence that is at least 95% identical to the amino acid sequence of SEQ ID NO:1, SEQ ID NO:2, SEQ ID NO:3, SEQ ID NO:4, SEQ ID NO:5, SEQ ID NO:6, SEQ ID NO:7, SEQ ID NO:8, SEQ ID NO:9, SEQ ID NO:10, SEQ ID NO: 11, SEQ ID NO:12, SEQ ID NO:13, SEQ ID NO:14, SEQ ID NO:15, SEQ ID NO:16, SEQ ID NO:17, SEQ ID NO:18, SEQ ID NO:19, SEQ ID NO:20, SEQ ID NO:21, SEQ ID NO:22, SEQ ID NO:23, SEQ ID NO:24, SEQ ID NO:48, SEQ ID NO:52, SEQ ID NO:59, SEQ ID NO:66, SEQ ID NO:73, SEQ ID NO:80, SEQ ID NO:84, SEQ ID NO:91, SEQ ID NO:98, SEQ ID NO:105, SEQ ID NO:109, SEQ ID NO:113, SEQ ID NO:120, SEQ ID NO:127, SEQ ID NO:134, SEQ ID NO:49, SEQ ID NO:56, SEQ ID NO:63, SEQ ID NO:70, SEQ ID NO:77, SEQ ID NO:81, SEQ ID NO:88, SEQ ID NO:95, SEQ ID NO:102, SEQ ID NO:106, SEQ ID NO:110, SEQ ID NO: 117, SEQ ID NO:124, SEQ ID NO:131, SEQ ID NO:138, SEQ ID NO:50, SEQ ID NO:57, SEQ ID NO:64, SEQ ID NO:71, SEQ ID NO:78, SEQ ID NO:82, SEQ ID NO:89, SEQ ID NO:96, SEQ ID NO:103, SEQ ID NO:107, SEQ ID NO:111, SEQ ID NO: 118, SEQ ID NO:125, SEQ ID NO:132, SEQ ID NO:139, SEQ ID NO:51, SEQ ID NO:58, SEQ ID NO:65, SEQ ID NO:72, SEQ ID NO:79, SEQ ID NO:83, SEQ ID NO:90, SEQ ID NO:97, SEQ ID NO:104, SEQ ID NO:108, SEQ ID NO: 112, SEQ ID NO: 119, SEQ ID NO:126, SEQ ID NO:133, or SEQ ID NO:140. In certain embodiments, the polypeptide described herein comprises an amino acid sequence that is at least 96% identical to the amino acid sequence of SEQ ID NO:1, SEQ ID NO:2, SEQ ID NO:3, SEQ ID NO:4, SEQ ID NO:5, SEQ ID NO:6, SEQ ID NO:7, SEQ ID NO:8, SEQ ID NO:9, SEQ ID NO:10, SEQ ID NO: 11, SEQ ID NO:12, SEQ ID NO:13, SEQ ID NO:14, SEQ ID NO:15, SEQ ID NO:16, SEQ ID NO:17, SEQ ID NO:18, SEQ ID NO:19, SEQ ID NO:20, SEQ ID NO:21, SEQ ID NO:22, SEQ ID NO:23, SEQ ID NO:24, SEQ ID NO:48, SEQ ID NO:52, SEQ ID NO:59, SEQ ID NO:66, SEQ ID NO:73, SEQ ID NO:80, SEQ ID NO:84, SEQ ID NO:91, SEQ ID NO:98, SEQ ID NO:105, SEQ ID NO:109, SEQ ID NO:113, SEQ ID NO:120, SEQ ID NO:127, SEQ ID NO:134, SEQ ID NO:49, SEQ ID NO:56, SEQ ID NO:63, SEQ ID NO:70, SEQ ID NO:77, SEQ ID NO:81, SEQ ID NO:88, SEQ ID NO:95, SEQ ID NO:102, SEQ ID NO:106, SEQ ID NO:110, SEQ ID NO: 117, SEQ ID NO:124, SEQ ID NO:131, SEQ ID NO:138, SEQ ID NO:50, SEQ ID NO:57, SEQ ID NO:64, SEQ ID NO:71, SEQ ID NO:78, SEQ ID NO:82, SEQ ID NO:89, SEQ ID NO:96, SEQ ID NO:103, SEQ ID NO:107, SEQ ID NO:111, SEQ ID NO: 118, SEQ ID NO:125, SEQ ID NO:132, SEQ ID NO:139, SEQ ID NO:51, SEQ ID NO:58, SEQ ID NO:65, SEQ ID NO:72, SEQ ID NO:79, SEQ ID NO:83, SEQ ID NO:90, SEQ ID NO:97, SEQ ID NO:104, SEQ ID NO:108, SEQ ID NO: 112, SEQ ID NO: 119, SEQ ID NO:126, SEQ ID NO:133, or SEQ ID NO:140. In certain embodiments, the polypeptide described herein comprises an amino acid sequence that is at least 97% identical to the amino acid sequence of SEQ ID NO:1, SEQ ID NO:2, SEQ ID NO:3, SEQ ID NO:4, SEQ ID NO:5, SEQ ID NO:6, SEQ ID NO:7, SEQ ID NO:8, SEQ ID NO:9, SEQ ID NO:10, SEQ ID NO:11, SEQ ID NO:12, SEQ ID NO:13, SEQ ID NO:14, SEQ ID NO:15, SEQ ID NO:16, SEQ ID NO:17, SEQ ID NO:18, SEQ ID NO:19, SEQ ID NO:20, SEQ ID NO:21, SEQ ID NO:22, SEQ ID NO:23, SEQ ID NO:24, SEQ ID NO:48, SEQ ID NO:52, SEQ ID NO:59, SEQ ID NO:66, SEQ ID NO:73, SEQ ID NO:80, SEQ ID NO:84, SEQ ID NO:91, SEQ ID NO:98, SEQ ID NO:105, SEQ ID NO:109, SEQ ID NO: 113, SEQ ID NO:120, SEQ ID NO:127, SEQ ID NO:134, SEQ ID NO:49, SEQ ID NO:56, SEQ ID NO:63, SEQ ID NO:70, SEQ ID NO:77, SEQ ID NO:81, SEQ ID NO:88, SEQ ID NO:95, SEQ ID NO:102, SEQ ID NO:106, SEQ ID NO:110, SEQ ID NO: 117, SEQ ID NO:124, SEQ ID NO:131, SEQ ID NO:138, SEQ ID NO:50, SEQ ID NO:57, SEQ ID NO:64, SEQ ID NO:71, SEQ ID NO:78, SEQ ID NO:82, SEQ ID NO:89, SEQ ID NO:96, SEQ ID NO:103, SEQ ID NO:107, SEQ ID NO:111, SEQ ID NO: 118, SEQ ID NO:125, SEQ ID NO:132, SEQ ID NO:139, SEQ ID NO:51, SEQ ID NO:58, SEQ ID NO:65, SEQ ID NO:72, SEQ ID NO:79, SEQ ID NO:83, SEQ ID NO:90, SEQ ID NO:97, SEQ ID NO:104, SEQ ID NO:108, SEQ ID NO: 112, SEQ ID NO: 119, SEQ ID NO:126, SEQ ID NO:133, or SEQ ID NO:140. In certain embodiments, the polypeptide described herein comprises an amino acid sequence that is at least 98% identical to the amino acid sequence of SEQ ID NO:1, SEQ ID NO:2, SEQ ID NO:3, SEQ ID NO:4, SEQ ID NO:5, SEQ ID NO:6, SEQ ID NO:7, SEQ ID NO:8, SEQ ID NO:9, SEQ ID NO:10, SEQ ID NO: 11, SEQ ID NO:12, SEQ ID NO:13, SEQ ID NO:14, SEQ ID NO:15, SEQ ID NO:16, SEQ ID NO:17, SEQ ID NO:18, SEQ ID NO:19, SEQ ID NO:20, SEQ ID NO:21, SEQ ID NO:22, SEQ ID NO:23, SEQ ID NO:24, SEQ ID NO:48, SEQ ID NO:52, SEQ ID NO:59, SEQ ID NO:66, SEQ ID NO:73, SEQ ID NO:80, SEQ ID NO:84, SEQ ID NO:91, SEQ ID NO:98, SEQ ID NO:105, SEQ ID NO:109, SEQ ID NO:113, SEQ ID NO:120, SEQ ID NO:127, SEQ ID NO:134, SEQ ID NO:49, SEQ ID NO:56, SEQ ID NO:63, SEQ ID NO:70, SEQ ID NO:77, SEQ ID NO:81, SEQ ID NO:88, SEQ ID NO:95, SEQ ID NO:102, SEQ ID NO:106, SEQ ID NO:110, SEQ ID NO:117, SEQ ID NO:124, SEQ ID NO:131, SEQ ID NO:138, SEQ ID NO:50, SEQ ID NO:57, SEQ ID NO:64, SEQ ID NO:71, SEQ ID NO:78, SEQ ID NO:82, SEQ ID NO:89, SEQ ID NO:96, SEQ ID NO:103, SEQ ID NO:107, SEQ ID NO:111, SEQ ID NO: 118, SEQ ID NO:125, SEQ ID NO:132, SEQ ID NO:139, SEQ ID NO:51, SEQ ID NO:58, SEQ ID NO:65, SEQ ID NO:72, SEQ ID NO:79, SEQ ID NO:83, SEQ ID NO:90, SEQ ID NO:97, SEQ ID NO:104, SEQ ID NO:108, SEQ ID NO:112, SEQ ID NO:119, SEQ ID NO:126, SEQ ID NO:133, or SEQ ID NO:140. In certain embodiments, the polypeptide described herein comprises an amino acid sequence that is at least 99% identical to the amino acid sequence of SEQ ID NO:1, SEQ ID NO:2, SEQ ID NO:3, SEQ ID NO:4, SEQ ID NO:5, SEQ ID NO:6, SEQ ID NO:7, SEQ ID NO:8, SEQ ID NO:9, SEQ ID NO:10, SEQ ID NO: 11, SEQ ID NO:12, SEQ ID NO:13, SEQ ID NO:14, SEQ ID NO:15, SEQ ID NO:16, SEQ ID NO:17, SEQ ID NO:18, SEQ ID NO:19, SEQ ID NO:20, SEQ ID NO:21, SEQ ID NO:22, SEQ ID NO:23, SEQ ID NO:24, SEQ ID NO:48, SEQ ID NO:52, SEQ ID NO:59, SEQ ID NO:66, SEQ ID NO:73, SEQ ID NO:80, SEQ ID NO:84, SEQ ID NO:91, SEQ ID NO:98, SEQ ID NO:105, SEQ ID NO:109, SEQ ID NO:113, SEQ ID NO:120, SEQ ID NO:127, SEQ ID NO:134, SEQ ID NO:49, SEQ ID NO:56, SEQ ID NO:63, SEQ ID NO:70, SEQ ID NO:77, SEQ ID NO:81, SEQ ID NO:88, SEQ ID NO:95, SEQ ID NO:102, SEQ ID NO:106, SEQ ID NO:110, SEQ ID NO: 117, SEQ ID NO:124, SEQ ID NO:131, SEQ ID NO:138, SEQ ID NO:50, SEQ ID NO:57, SEQ ID NO:64, SEQ ID NO:71, SEQ ID NO:78, SEQ ID NO:82, SEQ ID NO:89, SEQ ID NO:96, SEQ ID NO:103, SEQ ID NO:107, SEQ ID NO:111, SEQ ID NO: 118, SEQ ID NO:125, SEQ ID NO:132, SEQ ID NO:139, SEQ ID NO:51, SEQ ID NO:58, SEQ ID NO:65, SEQ ID NO:72, SEQ ID NO:79, SEQ ID NO:83, SEQ ID NO:90, SEQ ID NO:97, SEQ ID NO:104, SEQ ID NO:108, SEQ ID NO: 112, SEQ ID NO: 119, SEQ ID NO:126, SEQ ID NO:133, or SEQ ID NO:140. In certain embodiments, the polypeptide described herein comprises an amino acid sequence that is 100% identical to the amino acid sequence of SEQ ID NO:1, SEQ ID NO:2, SEQ ID NO:3, SEQ ID NO:4, SEQ ID NO:5, SEQ ID NO:6, SEQ ID NO:7, SEQ ID NO:8, SEQ ID NO:9, SEQ ID NO:10, SEQ ID NO: 11, SEQ ID NO:12, SEQ ID NO:13, SEQ ID NO:14, SEQ ID NO:15, SEQ ID NO:16, SEQ ID NO:17, SEQ ID NO:18, SEQ ID NO:19, SEQ ID NO:20, SEQ ID NO:21, SEQ ID NO:22, SEQ ID NO:23, SEQ ID NO:24, SEQ ID NO:48, SEQ ID NO:52, SEQ ID NO:59, SEQ ID NO:66, SEQ ID NO:73, SEQ ID NO:80, SEQ ID NO:84, SEQ ID NO:91, SEQ ID NO:98, SEQ ID NO:105, SEQ ID NO:109, SEQ ID NO:113, SEQ ID NO:120, SEQ ID NO:127, SEQ ID NO:134, SEQ ID NO:49, SEQ ID NO:56, SEQ ID NO:63, SEQ ID NO:70, SEQ ID NO:77, SEQ ID NO:81, SEQ ID NO:88, SEQ ID NO:95, SEQ ID NO:102, SEQ ID NO:106, SEQ ID NO:110, SEQ ID NO: 117, SEQ ID NO:124, SEQ ID NO:131, SEQ ID NO:138, SEQ ID NO:50, SEQ ID NO:57, SEQ ID NO:64, SEQ ID NO:71, SEQ ID NO:78, SEQ ID NO:82, SEQ ID NO:89, SEQ ID NO:96, SEQ ID NO:103, SEQ ID NO:107, SEQ ID NO:111, SEQ ID NO: 118, SEQ ID NO:125, SEQ ID NO:132, SEQ ID NO:139, SEQ ID NO:51, SEQ ID NO:58, SEQ ID NO:65, SEQ ID NO:72, SEQ ID NO:79, SEQ ID NO:83, SEQ ID NO:90, SEQ ID NO:97, SEQ ID NO:104, SEQ ID NO:108, SEQ ID NO: 112, SEQ ID NO: 119, SEQ ID NO:126, SEQ ID NO:133, or SEQ ID NO:140. In certain embodiments, the polypeptide described herein comprises an amino acid sequence that is 80% identical to the amino acid sequence of SEQ ID NO:1, SEQ ID NO:2, SEQ ID NO:3, SEQ ID NO:4, SEQ ID NO:5, SEQ ID NO:6, SEQ ID NO:7, SEQ ID NO:8, SEQ ID NO:9, SEQ ID NO:10, SEQ ID NO: 11, SEQ ID NO:12, SEQ ID NO:13, SEQ ID NO:14, SEQ ID NO:15, SEQ ID NO:16, SEQ ID NO:17, SEQ ID NO:18, SEQ ID NO:19, SEQ ID NO:20, SEQ ID NO:21, SEQ ID NO:22, SEQ ID NO:23, SEQ ID NO:24, SEQ ID NO:48, SEQ ID NO:52, SEQ ID NO:59, SEQ ID NO:66, SEQ ID NO:73, SEQ ID NO:80, SEQ ID NO:84, SEQ ID NO:91, SEQ ID NO:98, SEQ ID NO:105, SEQ ID NO:109, SEQ ID NO:113, SEQ ID NO:120, SEQ ID NO:127, SEQ ID NO:134, SEQ ID NO:49, SEQ ID NO:56, SEQ ID NO:63, SEQ ID NO:70, SEQ ID NO:77, SEQ ID NO:81, SEQ ID NO:88, SEQ ID NO:95, SEQ ID NO:102, SEQ ID NO:106, SEQ ID NO:110, SEQ ID NO: 117, SEQ ID NO:124, SEQ ID NO:131, SEQ ID NO:138, SEQ ID NO:50, SEQ ID NO:57, SEQ ID NO:64, SEQ ID NO:71, SEQ ID NO:78, SEQ ID NO:82, SEQ ID NO:89, SEQ ID NO:96, SEQ ID NO:103, SEQ ID NO:107, SEQ ID NO:111, SEQ ID NO: 118, SEQ ID NO:125, SEQ ID NO:132, SEQ ID NO:139, SEQ ID NO:51, SEQ ID NO:58, SEQ ID NO:65, SEQ ID NO:72, SEQ ID NO:79, SEQ ID NO:83, SEQ ID NO:90, SEQ ID NO:97, SEQ ID NO:104, SEQ ID NO:108, SEQ ID NO: 112, SEQ ID NO: 119, SEQ ID NO:126, SEQ ID NO:133, or SEQ ID NO:140. In certain embodiments, the polypeptide described herein comprises an amino acid sequence that is 85% identical to the amino acid sequence of SEQ ID NO:1, SEQ ID NO:2, SEQ ID NO:3, SEQ ID NO:4, SEQ ID NO:5, SEQ ID NO:6, SEQ ID NO:7, SEQ ID NO:8, SEQ ID NO:9, SEQ ID NO:10, SEQ ID NO: 11, SEQ ID NO:12, SEQ ID NO:13, SEQ ID NO:14, SEQ ID NO:15, SEQ ID NO:16, SEQ ID NO:17, SEQ ID NO:18, SEQ ID NO:19, SEQ ID NO:20, SEQ ID NO:21, SEQ ID NO:22, SEQ ID NO:23, SEQ ID NO:24, SEQ ID NO:48, SEQ ID NO:52, SEQ ID NO:59, SEQ ID NO:66, SEQ ID NO:73, SEQ ID NO:80, SEQ ID NO:84, SEQ ID NO:91, SEQ ID NO:98, SEQ ID NO:105, SEQ ID NO:109, SEQ ID NO:113, SEQ ID NO:120, SEQ ID NO:127, SEQ ID NO:134, SEQ ID NO:49, SEQ ID NO:56, SEQ ID NO:63, SEQ ID NO:70, SEQ ID NO:77, SEQ ID NO:81, SEQ ID NO:88, SEQ ID NO:95, SEQ ID NO:102, SEQ ID NO:106, SEQ ID NO:110, SEQ ID NO: 117, SEQ ID NO:124, SEQ ID NO:131, SEQ ID NO:138, SEQ ID NO:50, SEQ ID NO:57, SEQ ID NO:64, SEQ ID NO:71, SEQ ID NO:78, SEQ ID NO:82, SEQ ID NO:89, SEQ ID NO:96, SEQ ID NO:103, SEQ ID NO:107, SEQ ID NO:111, SEQ ID NO: 118, SEQ ID NO:125, SEQ ID NO:132, SEQ ID NO:139, SEQ ID NO:51, SEQ ID NO:58, SEQ ID NO:65, SEQ ID NO:72, SEQ ID NO:79, SEQ ID NO:83, SEQ ID NO:90, SEQ ID NO:97, SEQ ID NO:104, SEQ ID NO:108, SEQ ID NO: 112, SEQ ID NO: 119, SEQ ID NO:126, SEQ ID NO:133, or SEQ ID NO:140. In certain embodiments, the polypeptide described herein comprises an amino acid sequence that is 90% identical to the amino acid sequence of SEQ ID NO:1, SEQ ID NO:2, SEQ ID NO:3, SEQ ID NO:4, SEQ ID NO:5, SEQ ID NO:6, SEQ ID NO:7, SEQ ID NO:8, SEQ ID NO:9, SEQ ID NO:10, SEQ ID NO: 11, SEQ ID NO:12, SEQ ID NO:13, SEQ ID NO:14, SEQ ID NO:15, SEQ ID NO:16, SEQ ID NO:17, SEQ ID NO:18, SEQ ID NO:19, SEQ ID NO:20, SEQ ID NO:21, SEQ ID NO:22, SEQ ID NO:23, SEQ ID NO:24, SEQ ID NO:48, SEQ ID NO:52, SEQ ID NO:59, SEQ ID NO:66, SEQ ID NO:73, SEQ ID NO:80, SEQ ID NO:84, SEQ ID NO:91, SEQ ID NO:98, SEQ ID NO:105, SEQ ID NO:109, SEQ ID NO:113, SEQ ID NO:120, SEQ ID NO:127, SEQ ID NO:134, SEQ ID NO:49, SEQ ID NO:56, SEQ ID NO:63, SEQ ID NO:70, SEQ ID NO:77, SEQ ID NO:81, SEQ ID NO:88, SEQ ID NO:95, SEQ ID NO:102, SEQ ID NO:106, SEQ ID NO:110, SEQ ID NO: 117, SEQ ID NO:124, SEQ ID NO:131, SEQ ID NO:138, SEQ ID NO:50, SEQ ID NO:57, SEQ ID NO:64, SEQ ID NO:71, SEQ ID NO:78, SEQ ID NO:82, SEQ ID NO:89, SEQ ID NO:96, SEQ ID NO:103, SEQ ID NO:107, SEQ ID NO:111, SEQ ID NO: 118, SEQ ID NO:125, SEQ ID NO:132, SEQ ID NO:139, SEQ ID NO:51, SEQ ID NO:58, SEQ ID NO:65, SEQ ID NO:72, SEQ ID NO:79, SEQ ID NO:83, SEQ ID NO:90, SEQ ID NO:97, SEQ ID NO:104, SEQ ID NO:108, SEQ ID NO: 112, SEQ ID NO: 119, SEQ ID NO:126, SEQ ID NO:133, or SEQ ID NO:140. In certain embodiments, the polypeptide described herein comprises an amino acid sequence that is 95% identical to the amino acid sequence of SEQ ID NO:1, SEQ ID NO:2, SEQ ID NO:3, SEQ ID NO:4, SEQ ID NO:5, SEQ ID NO:6, SEQ ID NO:7, SEQ ID NO:8, SEQ ID NO:9, SEQ ID NO:10, SEQ ID NO: 11, SEQ ID NO:12, SEQ ID NO:13, SEQ ID NO:14, SEQ ID NO:15, SEQ ID NO:16, SEQ ID NO:17, SEQ ID NO:18, SEQ ID NO:19, SEQ ID NO:20, SEQ ID NO:21, SEQ ID NO:22, SEQ ID NO:23, SEQ ID NO:24, SEQ ID NO:48, SEQ ID NO:52, SEQ ID NO:59, SEQ ID NO:66, SEQ ID NO:73, SEQ ID NO:80, SEQ ID NO:84, SEQ ID NO:91, SEQ ID NO:98, SEQ ID NO:105, SEQ ID NO:109, SEQ ID NO:113, SEQ ID NO:120, SEQ ID NO:127, SEQ ID NO:134, SEQ ID NO:49, SEQ ID NO:56, SEQ ID NO:63, SEQ ID NO:70, SEQ ID NO:77, SEQ ID NO:81, SEQ ID NO:88, SEQ ID NO:95, SEQ ID NO:102, SEQ ID NO:106, SEQ ID NO:110, SEQ ID NO: 117, SEQ ID NO:124, SEQ ID NO:131, SEQ ID NO:138, SEQ ID NO:50, SEQ ID NO:57, SEQ ID NO:64, SEQ ID NO:71, SEQ ID NO:78, SEQ ID NO:82, SEQ ID NO:89, SEQ ID NO:96, SEQ ID NO:103, SEQ ID NO:107, SEQ ID NO:111, SEQ ID NO: 118, SEQ ID NO:125, SEQ ID NO:132, SEQ ID NO:139, SEQ ID NO:51, SEQ ID NO:58, SEQ ID NO:65, SEQ ID NO:72, SEQ ID NO:79, SEQ ID NO:83, SEQ ID NO:90, SEQ ID NO:97, SEQ ID NO:104, SEQ ID NO:108, SEQ ID NO: 112, SEQ ID NO: 119, SEQ ID NO:126, SEQ ID NO:133, or SEQ ID NO:140. In certain embodiments, the polypeptide described herein comprises an amino acid sequence that is 96% identical to the amino acid sequence of SEQ ID NO:1, SEQ ID NO:2, SEQ ID NO:3, SEQ ID NO:4, SEQ ID NO:5, SEQ ID NO:6, SEQ ID NO:7, SEQ ID NO:8, SEQ ID NO:9, SEQ ID NO:10, SEQ ID NO: 11, SEQ ID NO:12, SEQ ID NO:13, SEQ ID NO:14, SEQ ID NO:15, SEQ ID NO:16, SEQ ID NO:17, SEQ ID NO:18, SEQ ID NO:19, SEQ ID NO:20, SEQ ID NO:21, SEQ ID NO:22, SEQ ID NO:23, SEQ ID NO:24, SEQ ID NO:48, SEQ ID NO:52, SEQ ID NO:59, SEQ ID NO:66, SEQ ID NO:73, SEQ ID NO:80, SEQ ID NO:84, SEQ ID NO:91, SEQ ID NO:98, SEQ ID NO:105, SEQ ID NO:109, SEQ ID NO:113, SEQ ID NO:120, SEQ ID NO:127, SEQ ID NO:134, SEQ ID NO:49, SEQ ID NO:56, SEQ ID NO:63, SEQ ID NO:70, SEQ ID NO:77, SEQ ID NO:81, SEQ ID NO:88, SEQ ID NO:95, SEQ ID NO:102, SEQ ID NO:106, SEQ ID NO:110, SEQ ID NO: 117, SEQ ID NO:124, SEQ ID NO:131, SEQ ID NO:138, SEQ ID NO:50, SEQ ID NO:57, SEQ ID NO:64, SEQ ID NO:71, SEQ ID NO:78, SEQ ID NO:82, SEQ ID NO:89, SEQ ID NO:96, SEQ ID NO:103, SEQ ID NO:107, SEQ ID NO:111, SEQ ID NO: 118, SEQ ID NO:125, SEQ ID NO:132, SEQ ID NO:139, SEQ ID NO:51, SEQ ID NO:58, SEQ ID NO:65, SEQ ID NO:72, SEQ ID NO:79, SEQ ID NO:83, SEQ ID NO:90, SEQ ID NO:97, SEQ ID NO:104, SEQ ID NO:108, SEQ ID NO: 112, SEQ ID NO: 119, SEQ ID NO:126, SEQ ID NO:133, or SEQ ID NO:140. In certain embodiments, the polypeptide described herein comprises an amino acid sequence that is 97% identical to the amino acid sequence of SEQ ID NO:1, SEQ ID NO:2, SEQ ID NO:3, SEQ ID NO:4, SEQ ID NO:5, SEQ ID NO:6, SEQ ID NO:7, SEQ ID NO:8, SEQ ID NO:9, SEQ ID NO:10, SEQ ID NO: 11, SEQ ID NO:12, SEQ ID NO:13, SEQ ID NO:14, SEQ ID NO:15, SEQ ID NO:16, SEQ ID NO:17, SEQ ID NO:18, SEQ ID NO:19, SEQ ID NO:20, SEQ ID NO:21, SEQ ID NO:22, SEQ ID NO:23, SEQ ID NO:24, SEQ ID NO:48, SEQ ID NO:52, SEQ ID NO:59, SEQ ID NO:66, SEQ ID NO:73, SEQ ID NO:80, SEQ ID NO:84, SEQ ID NO:91, SEQ ID NO:98, SEQ ID NO:105, SEQ ID NO:109, SEQ ID NO:113, SEQ ID NO:120, SEQ ID NO:127, SEQ ID NO:134, SEQ ID NO:49, SEQ ID NO:56, SEQ ID NO:63, SEQ ID NO:70, SEQ ID NO:77, SEQ ID NO:81, SEQ ID NO:88, SEQ ID NO:95, SEQ ID NO:102, SEQ ID NO:106, SEQ ID NO:110, SEQ ID NO: 117, SEQ ID NO:124, SEQ ID NO:131, SEQ ID NO:138, SEQ ID NO:50, SEQ ID NO:57, SEQ ID NO:64, SEQ ID NO:71, SEQ ID NO:78, SEQ ID NO:82, SEQ ID NO:89, SEQ ID NO:96, SEQ ID NO:103, SEQ ID NO:107, SEQ ID NO:111, SEQ ID NO: 118, SEQ ID NO:125, SEQ ID NO:132, SEQ ID NO:139, SEQ ID NO:51, SEQ ID NO:58, SEQ ID NO:65, SEQ ID NO:72, SEQ ID NO:79, SEQ ID NO:83, SEQ ID NO:90, SEQ ID NO:97, SEQ ID NO:104, SEQ ID NO:108, SEQ ID NO: 112, SEQ ID NO: 119, SEQ ID NO:126, SEQ ID NO:133, or SEQ ID NO:140. In certain embodiments, the polypeptide described herein comprises an amino acid sequence that is 98% identical to the amino acid sequence of SEQ ID NO:1, SEQ ID NO:2, SEQ ID NO:3, SEQ ID NO:4, SEQ ID NO:5, SEQ ID NO:6, SEQ ID NO:7, SEQ ID NO:8, SEQ ID NO:9, SEQ ID NO:10, SEQ ID NO: 11, SEQ ID NO:12, SEQ ID NO:13, SEQ ID NO:14, SEQ ID NO:15, SEQ ID NO:16, SEQ ID NO:17, SEQ ID NO:18, SEQ ID NO:19, SEQ ID NO:20, SEQ ID NO:21, SEQ ID NO:22, SEQ ID NO:23, SEQ ID NO:24, SEQ ID NO:48, SEQ ID NO:52, SEQ ID NO:59, SEQ ID NO:66, SEQ ID NO:73, SEQ ID NO:80, SEQ ID NO:84, SEQ ID NO:91, SEQ ID NO:98, SEQ ID NO:105, SEQ ID NO:109, SEQ ID NO:113, SEQ ID NO:120, SEQ ID NO:127, SEQ ID NO:134, SEQ ID NO:49, SEQ ID NO:56, SEQ ID NO:63, SEQ ID NO:70, SEQ ID NO:77, SEQ ID NO:81, SEQ ID NO:88, SEQ ID NO:95, SEQ ID NO:102, SEQ ID NO:106, SEQ ID NO:110, SEQ ID NO: 117, SEQ ID NO:124, SEQ ID NO:131, SEQ ID NO:138, SEQ ID NO:50, SEQ ID NO:57, SEQ ID NO:64, SEQ ID NO:71, SEQ ID NO:78, SEQ ID NO:82, SEQ ID NO:89, SEQ ID NO:96, SEQ ID NO:103, SEQ ID NO:107, SEQ ID NO:111, SEQ ID NO: 118, SEQ ID NO:125, SEQ ID NO:132, SEQ ID NO:139, SEQ ID NO:51, SEQ ID NO:58, SEQ ID NO:65, SEQ ID NO:72, SEQ ID NO:79, SEQ ID NO:83, SEQ ID NO:90, SEQ ID NO:97, SEQ ID NO:104, SEQ ID NO:108, SEQ ID NO: 112, SEQ ID NO: 119, SEQ ID NO:126, SEQ ID NO:133, or SEQ ID NO:140. In certain embodiments, the polypeptide described herein comprises an amino acid sequence that is 99% identical to the amino acid sequence of SEQ ID NO:1, SEQ ID NO:2, SEQ ID NO:3, SEQ ID NO:4, SEQ ID NO:5, SEQ ID NO:6, SEQ ID NO:7, SEQ ID NO:8, SEQ ID NO:9, SEQ ID NO:10, SEQ ID NO: 11, SEQ ID NO:12, SEQ ID NO:13, SEQ ID NO:14, SEQ ID NO:15, SEQ ID NO:16, SEQ ID NO:17, SEQ ID NO:18, SEQ ID NO:19, SEQ ID NO:20, SEQ ID NO:21, SEQ ID NO:22, SEQ ID NO:23, SEQ ID NO:24, SEQ ID NO:48, SEQ ID NO:52, SEQ ID NO:59, SEQ ID NO:66, SEQ ID NO:73, SEQ ID NO:80, SEQ ID NO:84, SEQ ID NO:91, SEQ ID NO:98, SEQ ID NO:105, SEQ ID NO:109, SEQ ID NO:113, SEQ ID NO:120, SEQ ID NO:127, SEQ ID NO:134, SEQ ID NO:49, SEQ ID NO:56, SEQ ID NO:63, SEQ ID NO:70, SEQ ID NO:77, SEQ ID NO:81, SEQ ID NO:88, SEQ ID NO:95, SEQ ID NO:102, SEQ ID NO:106, SEQ ID NO:110, SEQ ID NO: 117, SEQ ID NO:124, SEQ ID NO:131, SEQ ID NO:138, SEQ ID NO:50, SEQ ID NO:57, SEQ ID NO:64, SEQ ID NO:71, SEQ ID NO:78, SEQ ID NO:82, SEQ ID NO:89, SEQ ID NO:96, SEQ ID NO:103, SEQ ID NO:107, SEQ ID NO:111, SEQ ID NO: 118, SEQ ID NO:125, SEQ ID NO:132, SEQ ID NO:139, SEQ ID NO:51, SEQ ID NO:58, SEQ ID NO:65, SEQ ID NO:72, SEQ ID NO:79, SEQ ID NO:83, SEQ ID NO:90, SEQ ID NO:97, SEQ ID NO:104, SEQ ID NO:108, SEQ ID NO: 112, SEQ ID NO: 119, SEQ ID NO:126, SEQ ID NO:133, or SEQ ID NO:140.

[0206] In certain embodiments, the polypeptide as described herein is arenavirus GP, namely arenavirus glycoprotein or any glycoprotein precursor. In certain embodiments, the polypeptide described herein is a wild-type arenavirus glycoprotein or any wild-type glycoprotein precursor. In other embodiments, the polypeptide described herein is a recombinant arenavirus glycoprotein or any recombinant glycoprotein precursor. In certain embodiments, the arenavirus glycoprotein precursor can be processed into a GP signal peptide, a GP1 and a GP2. In certain embodiments, the arenavirus GP is arenavirus glycoprotein or any glycoprotein precursor of LCMV, Lassa virus, Pichinde virus, Oliveros virus, Tamiami virus, Mobala virus, Mopeia virus, Ippy virus, Amapari virus, Flexal virus, Guanarito virus, Latino virus, Machupo virus, Parana virus, Pirital virus, Sabia virus, Tacaribe virus, Bear Canyon virus, Whitewater Arroyo virus, Allpahuayo virus (ALLV), Alxa virus, Chapare virus, Lijiang virus, Cupixi virus, Gairo virus, Loei River virus, Lujo virus, Luna virus, Luli virus, Lunk virus, Mariental virus, Merino Walk virus, Morogoro virus, Okahandja virus, Aporé virus, Ryukyu virus, Solwezi virus, souris virus, Wenzhou virus, Big Brushy Tank virus, Catarina virus, Skinner Tank virus, Tonto Creek virus, Xapuri virus, or Junin virus. In certain embodiments, the arenavirus GP as described herein comprises an amino acid sequence that is at least 80%, 85%, 90%, 95%, 96%, 97%, 98%, 99% or 100% identical to the amino acid sequence of SEQ ID NO:1, SEQ ID NO:2, SEQ ID NO:3, SEQ ID NO:4, SEQ ID NO:5, SEQ ID NO:6, SEQ ID NO:48, SEQ ID NO:52, SEQ ID NO:59, SEQ ID NO:66, SEQ ID NO:73, SEQ ID NO:80, SEQ ID NO:84, SEQ ID NO:91, SEQ ID NO:98, SEQ ID NO:105, SEQ ID NO:109, SEQ ID NO: 113, SEQ ID NO:120, SEQ ID NO:127, or SEQ ID NO:134. In certain embodiments, the arenavirus GP as described herein comprises an amino acid sequence that is at least 80% identical to the amino acid sequence of SEQ ID NO:1, SEQ ID NO:2, SEQ ID NO:3, SEQ ID NO:4, SEQ ID NO:5, SEQ ID NO:6, SEQ ID NO:48, SEQ ID NO:52, SEQ ID NO:59, SEQ ID NO:66, SEQ ID NO:73, SEQ ID NO:80, SEQ ID NO:84, SEQ ID NO:91, SEQ ID NO:98, SEQ ID NO:105, SEQ ID NO:109, SEQ ID NO: 113, SEQ ID NO:120, SEQ ID NO:127, or SEQ ID NO:134. In certain embodiments, the arenavirus GP as described herein comprises an amino acid sequence that is at least 85% identical to the amino acid sequence of SEQ ID NO:1, SEQ ID NO:2, SEQ ID NO:3, SEQ ID NO:4, SEQ ID NO:5, SEQ ID NO:6, SEQ ID NO:48, SEQ ID NO:52, SEQ ID NO:59, SEQ ID NO:66, SEQ ID NO:73, SEQ ID NO:80, SEQ ID NO:84, SEQ ID NO:91, SEQ ID NO:98, SEQ ID NO:105, SEQ ID NO:109, SEQ ID NO:113, SEQ ID NO:120, SEQ ID NO:127, or SEQ ID NO:134. In certain embodiments, the GP as described herein comprises an amino acid sequence that is at least 90% identical to the amino acid sequence of SEQ ID NO:1, SEQ ID NO:2, SEQ ID NO:3, SEQ ID NO:4, SEQ ID NO:5, SEQ ID NO:6, SEQ ID NO:48, SEQ ID NO:52, SEQ ID NO:59, SEQ ID NO:66, SEQ ID NO:73, SEQ ID NO:80, SEQ ID NO:84, SEQ ID NO:91, SEQ ID NO:98, SEQ ID NO:105, SEQ ID NO:109, SEQ ID NO: 113, SEQ ID NO:120, SEQ ID NO:127, or SEQ ID NO:134. In certain embodiments, the arenavirus GP as described herein comprises an amino acid sequence that is at least 95% identical to the amino acid sequence of SEQ ID NO:1, SEQ ID NO:2, SEQ ID NO:3, SEQ ID NO:4, SEQ ID NO:5, SEQ ID NO:6, SEQ ID NO:48, SEQ ID NO:52, SEQ ID NO:59, SEQ ID NO:66, SEQ ID NO:73, SEQ ID NO:80, SEQ ID NO:84, SEQ ID NO:91, SEQ ID NO:98, SEQ ID NO:105, SEQ ID NO:109, SEQ ID NO:113, SEQ ID NO:120, SEQ ID NO:127, or SEQ ID NO:134. In certain embodiments, the arenavirus GP as described herein comprises an amino acid sequence that is at least 96% identical to the amino acid sequence of SEQ ID NO:1, SEQ ID NO:2, SEQ ID NO:3, SEQ ID NO:4, SEQ ID NO:5, SEQ ID NO:6, SEQ ID NO:48, SEQ ID NO:52, SEQ ID NO:59, SEQ ID NO:66, SEQ ID NO:73, SEQ ID NO:80, SEQ ID NO:84, SEQ ID NO:91, SEQ ID NO:98, SEQ ID NO:105, SEQ ID NO:109, SEQ ID NO: 113, SEQ ID NO:120, SEQ ID NO:127, or SEQ ID NO:134. In certain embodiments, the arenavirus GP as described herein comprises an amino acid sequence that is at least 97% identical to the amino acid sequence of SEQ ID NO:1, SEQ ID NO:2, SEQ ID NO:3, SEQ ID NO:4, SEQ ID NO:5, SEQ ID NO:6, SEQ ID NO:48, SEQ ID NO:52, SEQ ID NO:59, SEQ ID NO:66, SEQ ID NO:73, SEQ ID NO:80, SEQ ID NO:84, SEQ ID NO:91, SEQ ID NO:98, SEQ ID NO:105, SEQ ID NO:109, SEQ ID NO:113, SEQ ID NO:120, SEQ ID NO:127, or SEQ ID NO:134. In certain embodiments, the arenavirus GP as described herein comprises an amino acid sequence that is at least 98% identical to the amino acid sequence of SEQ ID NO:1, SEQ ID NO:2, SEQ ID NO:3, SEQ ID NO:4, SEQ ID NO:5, SEQ ID NO:6, SEQ ID NO:48, SEQ ID NO:52, SEQ ID NO:59, SEQ ID NO:66, SEQ ID NO:73, SEQ ID NO:80, SEQ ID NO:84, SEQ ID NO:91, SEQ ID NO:98, SEQ ID NO:105, SEQ ID NO:109, SEQ ID NO: 113, SEQ ID NO:120, SEQ ID NO:127, or SEQ ID NO:134. In certain embodiments, the arenavirus GP as described herein comprises an amino acid sequence that is at least 99% identical to the amino acid sequence of SEQ ID NO:1, SEQ ID NO:2, SEQ ID NO:3, SEQ ID NO:4, SEQ ID NO:5, SEQ ID NO:6, SEQ ID NO:48, SEQ ID NO:52, SEQ ID NO:59, SEQ ID NO:66, SEQ ID NO:73, SEQ ID NO:80, SEQ ID NO:84, SEQ ID NO:91, SEQ ID NO:98, SEQ ID NO:105, SEQ ID NO:109, SEQ ID NO:113, SEQ ID NO:120, SEQ ID NO:127, or SEQ ID NO:134. In certain embodiments, the arenavirus GP as described herein comprises an amino acid sequence that is 100% identical to the amino acid sequence of SEQ ID NO:1, SEQ ID NO:2, SEQ ID NO:3, SEQ ID NO:4, SEQ ID NO:5, SEQ ID NO:6, SEQ ID NO:48, SEQ ID NO:52, SEQ ID NO:59, SEQ ID NO:66, SEQ ID NO:73, SEQ ID NO:80, SEQ ID NO:84, SEQ ID NO:91, SEQ ID NO:98, SEQ ID NO:105, SEQ ID NO:109, SEQ ID NO:113, SEQ ID NO:120, SEQ ID NO:127, or SEQ ID NO:134. In certain embodiments, the GP as described herein comprises an amino acid sequence that is 80% identical to the amino acid sequence of SEQ ID NO:1, SEQ ID NO:2, SEQ ID NO:3, SEQ ID NO:4, SEQ ID NO:5, SEQ ID NO:6, SEQ ID NO:48, SEQ ID NO:52, SEQ ID NO:59, SEQ ID NO:66, SEQ ID NO:73, SEQ ID NO:80, SEQ ID NO:84, SEQ ID NO:91, SEQ ID NO:98, SEQ ID NO:105, SEQ ID NO:109, SEQ ID NO: 113, SEQ ID NO:120, SEQ ID NO:127, or SEQ ID NO:134. In certain embodiments, the arenavirus GP as described herein comprises an amino acid sequence that is 85% identical to the amino acid sequence of SEQ ID NO:1, SEQ ID NO:2, SEQ ID NO:3, SEQ ID NO:4, SEQ ID NO:5, SEQ ID NO:6, SEQ ID NO:48, SEQ ID NO:52, SEQ ID NO:59, SEQ ID NO:66, SEQ ID NO:73, SEQ ID NO:80, SEQ ID NO:84, SEQ ID NO:91, SEQ ID NO:98, SEQ ID NO:105, SEQ ID NO:109, SEQ ID NO: 113, SEQ ID NO:120, SEQ ID NO:127, or SEQ ID NO:134. In certain embodiments, the arenavirus GP as described herein comprises an amino acid sequence that is 90% identical to the amino acid sequence of SEQ ID NO:1, SEQ ID NO:2, SEQ ID NO:3, SEQ ID NO:4, SEQ ID NO:5, SEQ ID NO:6, SEQ ID NO:48, SEQ ID NO:52, SEQ ID NO:59, SEQ ID NO:66, SEQ ID NO:73, SEQ ID NO:80, SEQ ID NO:84, SEQ ID NO:91, SEQ ID NO:98, SEQ ID NO:105, SEQ ID NO:109, SEQ ID NO: 113, SEQ ID NO:120, SEQ ID NO:127, or SEQ ID NO:134. In certain embodiments, the arenavirus GP as described herein comprises an amino acid sequence that is 95% identical to the amino acid sequence of SEQ ID NO:1, SEQ ID NO:2, SEQ ID NO:3, SEQ ID NO:4, SEQ ID NO:5, SEQ ID NO:6, SEQ ID NO:48, SEQ ID NO:52, SEQ ID NO:59, SEQ ID NO:66, SEQ ID NO:73, SEQ ID NO:80, SEQ ID NO:84, SEQ ID NO:91, SEQ ID NO:98, SEQ ID NO:105, SEQ ID NO:109, SEQ ID NO: 113, SEQ ID NO:120, SEQ ID NO:127, or SEQ ID NO:134. In certain embodiments, the arenavirus GP as described herein comprises an amino acid sequence that is 96% identical to the amino acid sequence of SEQ ID NO:1, SEQ ID NO:2, SEQ ID NO:3, SEQ ID NO:4, SEQ ID NO:5, SEQ ID NO:6, SEQ ID NO:48, SEQ ID NO:52, SEQ ID NO:59, SEQ ID NO:66, SEQ ID NO:73, SEQ ID NO:80, SEQ ID NO:84, SEQ ID NO:91, SEQ ID NO:98, SEQ ID NO:105, SEQ ID NO:109, SEQ ID NO: 113, SEQ ID NO:120, SEQ ID NO:127, or SEQ ID NO:134. In certain embodiments, the arenavirus GP as described herein comprises an amino acid sequence that is 97% identical to the amino acid sequence of SEQ ID NO:1, SEQ ID NO:2, SEQ ID NO:3, SEQ ID NO:4, SEQ ID NO:5, SEQ ID NO:6, SEQ ID NO:48, SEQ ID NO:52, SEQ ID NO:59, SEQ ID NO:66, SEQ ID NO:73, SEQ ID NO:80, SEQ ID NO:84, SEQ ID NO:91, SEQ ID NO:98, SEQ ID NO:105, SEQ ID NO:109, SEQ ID NO: 113, SEQ ID NO:120, SEQ ID NO:127, or SEQ ID NO:134. In certain embodiments, the arenavirus GP as described herein comprises an amino acid sequence that is 98% identical to the amino acid sequence of SEQ ID NO:1, SEQ ID NO:2, SEQ ID NO:3, SEQ ID NO:4, SEQ ID NO:5, SEQ ID NO:6, SEQ ID NO:48, SEQ ID NO:52, SEQ ID NO:59, SEQ ID NO:66, SEQ ID NO:73, SEQ ID NO:80, SEQ ID NO:84, SEQ ID NO:91, SEQ ID NO:98, SEQ ID NO:105, SEQ ID NO:109, SEQ ID NO: 113, SEQ ID NO:120, SEQ ID NO:127, or SEQ ID NO:134. In certain embodiments, the arenavirus GP as described herein comprises an amino acid sequence that is 99% identical to the amino acid sequence of SEQ ID NO:1, SEQ ID NO:2, SEQ ID NO:3, SEQ ID NO:4, SEQ ID NO:5, SEQ ID NO:6, SEQ ID NO:48, SEQ ID NO:52, SEQ ID NO:59, SEQ ID NO:66, SEQ ID NO:73, SEQ ID NO:80, SEQ ID NO:84, SEQ ID NO:91, SEQ ID NO:98, SEQ ID NO:105, SEQ ID NO:109, SEQ ID NO: 113, SEQ ID NO:120, SEQ ID NO:127, or SEQ ID NO:134.

[0207] In certain embodiments, the polypeptide as described herein is arenavirus NP, namely arenavirus nucleoprotein or any nucleoprotein precursor. In certain embodiments, the polypeptide described herein is a wild-type arenavirus nucleoprotein or any wild-type nucleoprotein precursor. In other embodiments, the polypeptide described herein is a recombinant arenavirus nucleoprotein or any recombinant nucleoprotein precursor. In certain embodiments, the arenavirus NP is arenavirus nucleoprotein or any nucleoprotein precursor of LCMV, Lassa virus, Pichinde virus, Oliveros virus, Tamiami virus, Mobala virus, Mopeia virus, Ippy virus, Amapari virus, Flexal virus, Guanarito virus, Latino virus, Machupo virus, Parana virus, Pirital virus, Sabia virus, Tacaribe virus, Bear Canyon virus, Whitewater Arroyo virus, Allpahuayo virus (ALLV), Alxa virus, Chapare virus, Lijiang virus, Cupixi virus, Gairo virus, Loei River virus, Lujo virus, Luna virus, Luli virus, Lunk virus, Mariental virus, Merino Walk virus, Morogoro virus, Okahandja virus, Aporé virus, Ryukyu virus, Solwezi virus, souris virus, Wenzhou virus, Big Brushy Tank virus, Catarina virus, Skinner Tank virus, Tonto Creek virus, Xapuri virus, or Junin virus. In certain embodiments, the arenavirus NP as described herein comprises an amino acid sequence that is at least 80%, 85%, 90%, 95%, 96%, 97%, 98%, 99% or 100% identical to the amino acid sequence of SEQ ID NO:7, SEQ ID NO:8, SEQ ID NO:9, SEQ ID NO:10, SEQ ID NO: 11, SEQ ID NO:12, SEQ ID NO:49, SEQ ID NO:56, SEQ ID NO:63, SEQ ID NO:70, SEQ ID NO:77, SEQ ID NO:81, SEQ ID NO:88, SEQ ID NO:95, SEQ ID NO:102, SEQ ID NO:106, SEQ ID NO:110, SEQ ID NO: 117, SEQ ID NO:124, SEQ ID NO:131, or SEQ ID NO:138. In certain embodiments, the arenavirus NP as described herein comprises an amino acid sequence that is at least 80% identical to the amino acid sequence of SEQ ID NO:7, SEQ ID NO:8, SEQ ID NO:9, SEQ ID NO:10, SEQ ID NO:11, SEQ ID NO:12, SEQ ID NO:49, SEQ ID NO:56, SEQ ID NO:63, SEQ ID NO:70, SEQ ID NO:77, SEQ ID NO:81, SEQ ID NO:88, SEQ ID NO:95, SEQ ID NO:102, SEQ ID NO:106, SEQ ID NO:110, SEQ ID NO: 117, SEQ ID NO:124, SEQ ID NO:131, or SEQ ID NO:138. In certain embodiments, the arenavirus NP as described herein comprises an amino acid sequence that is at least 85% identical to the amino acid sequence of SEQ ID NO:7, SEQ ID NO:8, SEQ ID NO:9, SEQ ID NO:10, SEQ ID NO:11, SEQ ID NO:12, SEQ ID NO:49, SEQ ID NO:56, SEQ ID NO:63, SEQ ID NO:70, SEQ ID NO:77, SEQ ID NO:81, SEQ ID NO:88, SEQ ID NO:95, SEQ ID NO:102, SEQ ID NO:106, SEQ ID NO:110, SEQ ID NO:117, SEQ ID NO:124, SEQ ID NO:131, or SEQ ID NO:138. In certain embodiments, the arenavirus NP as described herein comprises an amino acid sequence that is at least 90% identical to the amino acid sequence of SEQ ID NO:7, SEQ ID NO:8, SEQ ID NO:9, SEQ ID NO:10, SEQ ID NO:11, SEQ ID NO:12, SEQ ID NO:49, SEQ ID NO:56, SEQ ID NO:63, SEQ ID NO:70, SEQ ID NO:77, SEQ ID NO:81, SEQ ID NO:88, SEQ ID NO:95, SEQ ID NO:102, SEQ ID NO:106, SEQ ID NO:110, SEQ ID NO:117, SEQ ID NO:124, SEQ ID NO:131, or SEQ ID NO:138. In certain embodiments, the arenavirus NP as described herein comprises an amino acid sequence that is at least 95% identical to the amino acid sequence of SEQ ID NO:7, SEQ ID NO:8, SEQ ID NO:9, SEQ ID NO:10, SEQ ID NO:11, SEQ ID NO:12, SEQ ID NO:49, SEQ ID NO:56, SEQ ID NO:63, SEQ ID NO:70, SEQ ID NO:77, SEQ ID NO:81, SEQ ID NO:88, SEQ ID NO:95, SEQ ID NO:102, SEQ ID NO:106, SEQ ID NO:110, SEQ ID NO: 117, SEQ ID NO:124, SEQ ID NO:131, or SEQ ID NO:138. In certain embodiments, the arenavirus NP as described herein comprises an amino acid sequence that is at least 96% identical to the amino acid sequence of SEQ ID NO:7, SEQ ID NO:8, SEQ ID NO:9, SEQ ID NO:10, SEQ ID NO:11, SEQ ID NO:12, SEQ ID NO:49, SEQ ID NO:56, SEQ ID NO:63, SEQ ID NO:70, SEQ ID NO:77, SEQ ID NO:81, SEQ ID NO:88, SEQ ID NO:95, SEQ ID NO:102, SEQ ID NO:106, SEQ ID NO:110, SEQ ID NO: 117, SEQ ID NO:124, SEQ ID NO:131, or SEQ ID NO:138. In certain embodiments, the arenavirus NP as described herein comprises an amino acid sequence that is at least 97% identical to the amino acid sequence of SEQ ID NO:7, SEQ ID NO:8, SEQ ID NO:9, SEQ ID NO:10, SEQ ID NO:11, SEQ ID NO:12, SEQ ID NO:49, SEQ ID NO:56, SEQ ID NO:63, SEQ ID NO:70, SEQ ID NO:77, SEQ ID NO:81, SEQ ID NO:88, SEQ ID NO:95, SEQ ID NO:102, SEQ ID NO:106, SEQ ID NO:110, SEQ ID NO: 117, SEQ ID NO:124, SEQ ID NO:131, or SEQ ID NO:138. In certain embodiments, the arenavirus NP as described herein comprises an amino acid sequence that is at least 98% identical to the amino acid sequence of SEQ ID NO:7, SEQ ID NO:8, SEQ ID NO:9, SEQ ID NO:10, SEQ ID NO:11, SEQ ID NO:12, SEQ ID NO:49, SEQ ID NO:56, SEQ ID NO:63, SEQ ID NO:70, SEQ ID NO:77, SEQ ID NO:81, SEQ ID NO:88, SEQ ID NO:95, SEQ ID NO:102, SEQ ID NO:106, SEQ ID NO:110, SEQ ID NO:117, SEQ ID NO:124, SEQ ID NO:131, or SEQ ID NO:138. In certain embodiments, the arenavirus NP as described herein comprises an amino acid sequence that is at least 99% identical to the amino acid sequence of SEQ ID NO:7, SEQ ID NO:8, SEQ ID NO:9, SEQ ID NO:10, SEQ ID NO:11, SEQ ID NO:12, SEQ ID NO:49, SEQ ID NO:56, SEQ ID NO:63, SEQ ID NO:70, SEQ ID NO:77, SEQ ID NO:81, SEQ ID NO:88, SEQ ID NO:95, SEQ ID NO:102, SEQ ID NO:106, SEQ ID NO:110, SEQ ID NO:117, SEQ ID NO:124, SEQ ID NO:131, or SEQ ID NO:138. In certain embodiments, the arenavirus NP as described herein comprises an amino acid sequence that is 100% identical to the amino acid sequence of SEQ ID NO:7, SEQ ID NO:8, SEQ ID NO:9, SEQ ID NO:10, SEQ ID NO:11, SEQ ID NO:12, SEQ ID NO:49, SEQ ID NO:56, SEQ ID NO:63, SEQ ID NO:70, SEQ ID NO:77, SEQ ID NO:81, SEQ ID NO:88, SEQ ID NO:95, SEQ ID NO:102, SEQ ID NO:106, SEQ ID NO:110, SEQ ID NO: 117, SEQ ID NO:124, SEQ ID NO:131, or SEQ ID NO:138. In certain embodiments, the arenavirus NP as described herein comprises an amino acid sequence that is 80% identical to the amino acid sequence of SEQ ID NO:7, SEQ ID NO:8, SEQ ID NO:9, SEQ ID NO:10, SEQ ID NO: 11, SEQ ID NO:12, SEQ ID NO:49, SEQ ID NO:56, SEQ ID NO:63, SEQ ID NO:70, SEQ ID NO:77, SEQ ID NO:81, SEQ ID NO:88, SEQ ID NO:95, SEQ ID NO:102, SEQ ID NO:106, SEQ ID NO:110, SEQ ID NO: 117, SEQ ID NO:124, SEQ ID NO:131, or SEQ ID NO:138. In certain embodiments, the arenavirus NP as described herein comprises an amino acid sequence that is 85% identical to the amino acid sequence of SEQ ID NO:7, SEQ ID NO:8, SEQ ID NO:9, SEQ ID NO:10, SEQ ID NO: 11, SEQ ID NO:12, SEQ ID NO:49, SEQ ID NO:56, SEQ ID NO:63, SEQ ID NO:70, SEQ ID NO:77, SEQ ID NO:81, SEQ ID NO:88, SEQ ID NO:95, SEQ ID NO:102, SEQ ID NO:106, SEQ ID NO:110, SEQ ID NO: 117, SEQ ID NO:124, SEQ ID NO:131, or SEQ ID NO:138. In certain embodiments, the arenavirus NP as described herein comprises an amino acid sequence that is 90% identical to the amino acid sequence of SEQ ID NO:7, SEQ ID NO:8, SEQ ID NO:9, SEQ ID NO:10, SEQ ID NO:11, SEQ ID NO:12, SEQ ID NO:49, SEQ ID NO:56, SEQ ID NO:63, SEQ ID NO:70, SEQ ID NO:77, SEQ ID NO:81, SEQ ID NO:88, SEQ ID NO:95, SEQ ID NO:102, SEQ ID NO:106, SEQ ID NO:110, SEQ ID NO: 117, SEQ ID NO:124, SEQ ID NO:131, or SEQ ID NO:138. In certain embodiments, the arenavirus NP as described herein comprises an amino acid sequence that is 95% identical to the amino acid sequence of SEQ ID NO:7, SEQ ID NO:8, SEQ ID NO:9, SEQ ID NO:10, SEQ ID NO: 11, SEQ ID NO:12, SEQ ID NO:49, SEQ ID NO:56, SEQ ID NO:63, SEQ ID NO:70, SEQ ID NO:77, SEQ ID NO:81, SEQ ID NO:88, SEQ ID NO:95, SEQ ID NO:102, SEQ ID NO:106, SEQ ID NO:110, SEQ ID NO: 117, SEQ ID NO:124, SEQ ID NO:131, or SEQ ID NO:138. In certain embodiments, the arenavirus NP as described herein comprises an amino acid sequence that is 96% identical to the amino acid sequence of SEQ ID NO:7, SEQ ID NO:8, SEQ ID NO:9, SEQ ID NO:10, SEQ ID NO:11, SEQ ID NO:12, SEQ ID NO:49, SEQ ID NO:56, SEQ ID NO:63, SEQ ID NO:70, SEQ ID NO:77, SEQ ID NO:81, SEQ ID NO:88, SEQ ID NO:95, SEQ ID NO:102, SEQ ID NO:106, SEQ ID NO:110, SEQ ID NO:117, SEQ ID NO:124, SEQ ID NO:131, or SEQ ID NO:138. In certain embodiments, the arenavirus NP as described herein comprises an amino acid sequence that is 97% identical to the amino acid sequence of SEQ ID NO:7, SEQ ID NO:8, SEQ ID NO:9, SEQ ID NO:10, SEQ ID NO:11, SEQ ID NO:12, SEQ ID NO:49, SEQ ID NO:56, SEQ ID NO:63, SEQ ID NO:70, SEQ ID NO:77, SEQ ID NO:81, SEQ ID NO:88, SEQ ID NO:95, SEQ ID NO:102, SEQ ID NO:106, SEQ ID NO:110, SEQ ID NO: 117, SEQ ID NO:124, SEQ ID NO:131, or SEQ ID NO:138. In certain embodiments, the arenavirus NP as described herein comprises an amino acid sequence that is 98% identical to the amino acid sequence of SEQ ID NO:7, SEQ ID NO:8, SEQ ID NO:9, SEQ ID NO:10, SEQ ID NO:11, SEQ ID NO:12, SEQ ID NO:49, SEQ ID NO:56, SEQ ID NO:63, SEQ ID NO:70, SEQ ID NO:77, SEQ ID NO:81, SEQ ID NO:88, SEQ ID NO:95, SEQ ID NO:102, SEQ ID NO:106, SEQ ID NO:110, SEQ ID NO:117, SEQ ID NO:124, SEQ ID NO:131, or SEQ ID NO:138. In certain embodiments, the arenavirus NP as described herein comprises an amino acid sequence that is 99% identical to the amino acid sequence of SEQ ID NO:7, SEQ ID NO:8, SEQ ID NO:9, SEQ ID NO:10, SEQ ID NO:11, SEQ ID NO:12, SEQ ID NO:49, SEQ ID NO:56, SEQ ID NO:63, SEQ ID NO:70, SEQ ID NO:77, SEQ ID NO:81, SEQ ID NO:88, SEQ ID NO:95, SEQ ID NO:102, SEQ ID NO:106, SEQ ID NO:110, SEQ ID NO: 117, SEQ ID NO:124, SEQ ID NO:131, or SEQ ID NO:138.

[0208] In certain embodiments, the polypeptide as described herein is arenavirus Z, namely arenavirus Z protein or any Z protein precursor. In certain embodiments, the polypeptide described herein is a wild-type arenavirus Z protein or any wild-type Z protein precursor. In other embodiments, the polypeptide described herein is a recombinant arenavirus Z protein or any recombinant Z protein precursor. In certain embodiments, the arenavirus Z is arenavirus Z protein or any Z protein precursor of LCMV, Lassa virus, Pichinde virus, Oliveros virus, Tamiami virus, Mobala virus, Mopeia virus, Ippy virus, Amapari virus, Flexal virus, Guanarito virus, Latino virus, Machupo virus, Parana virus, Pirital virus, Sabia virus, Tacaribe virus, Bear Canyon virus, Whitewater Arroyo virus, Allpahuayo virus (ALLV), Alxa virus, Chapare virus, Lijiang virus, Cupixi virus, Gairo virus, Loei River virus, Lujo virus, Luna virus, Luli virus, Lunk virus, Mariental virus, Merino Walk virus, Morogoro virus, Okahandja virus, Aporé virus, Ryukyu virus, Solwezi virus, souris virus, Wenzhou virus, Big Brushy Tank virus, Catarina virus, Skinner Tank virus, Tonto Creek virus, Xapuri virus, or Junin virus. In certain embodiments, the arenavirus Z as described herein comprises an amino acid sequence that is at least 80%, 85%, 90%, 95%, 96%, 97%, 98%, 99% or 100% identical to the amino acid sequence of SEQ ID NO:13, SEQ ID NO:14, SEQ ID NO:15, SEQ ID NO:16, SEQ ID NO:17, SEQ ID NO:18, SEQ ID NO:50, SEQ ID NO:57, SEQ ID NO:64, SEQ ID NO:71, SEQ ID NO:78, SEQ ID NO:82, SEQ ID NO:89, SEQ ID NO:96, SEQ ID NO:103, SEQ ID NO:107, SEQ ID NO:111, SEQ ID NO: 118, SEQ ID NO:125, SEQ ID NO:132, or SEQ ID NO:139. In certain embodiments, the arenavirus Z as described herein comprises an amino acid sequence that is at least 80% identical to the amino acid sequence of SEQ ID NO:13, SEQ ID NO:14, SEQ ID NO:15, SEQ ID NO:16, SEQ ID NO:17, SEQ ID NO:18, SEQ ID NO:50, SEQ ID NO:57, SEQ ID NO:64, SEQ ID NO:71, SEQ ID NO:78, SEQ ID NO:82, SEQ ID NO:89, SEQ ID NO:96, SEQ ID NO:103, SEQ ID NO:107, SEQ ID NO:111, SEQ ID NO: 118, SEQ ID NO:125, SEQ ID NO:132, or SEQ ID NO:139. In certain embodiments, the arenavirus Z as described herein comprises an amino acid sequence that is at least 85% identical to the amino acid sequence of SEQ ID NO:13, SEQ ID NO:14, SEQ ID NO:15, SEQ ID NO:16, SEQ ID NO:17, SEQ ID NO:18, SEQ ID NO:50, SEQ ID NO:57, SEQ ID NO:64, SEQ ID NO:71, SEQ ID NO:78, SEQ ID NO:82, SEQ ID NO:89, SEQ ID NO:96, SEQ ID NO:103, SEQ ID NO:107, SEQ ID NO:111, SEQ ID NO: 118, SEQ ID NO:125, SEQ ID NO:132, or SEQ ID NO:139. In certain embodiments, the arenavirus Z as described herein comprises an amino acid sequence that is at least 90% identical to the amino acid sequence of SEQ ID NO:13, SEQ ID NO:14, SEQ ID NO:15, SEQ ID NO:16, SEQ ID NO:17, SEQ ID NO:18, SEQ ID NO:50, SEQ ID NO:57, SEQ ID NO:64, SEQ ID NO:71, SEQ ID NO:78, SEQ ID NO:82, SEQ ID NO:89, SEQ ID NO:96, SEQ ID NO:103, SEQ ID NO:107, SEQ ID NO:111, SEQ ID NO: 118, SEQ ID NO:125, SEQ ID NO:132, or SEQ ID NO:139. In certain embodiments, the arenavirus Z as described herein comprises an amino acid sequence that is at least 95% identical to the amino acid sequence of SEQ ID NO:13, SEQ ID NO:14, SEQ ID NO:15, SEQ ID NO:16, SEQ ID NO:17, SEQ ID NO:18, SEQ ID NO:50, SEQ ID NO:57, SEQ ID NO:64, SEQ ID NO:71, SEQ ID NO:78, SEQ ID NO:82, SEQ ID NO:89, SEQ ID NO:96, SEQ ID NO:103, SEQ ID NO:107, SEQ ID NO:111, SEQ ID NO: 118, SEQ ID NO:125, SEQ ID NO:132, or SEQ ID NO:139. In certain embodiments, the arenavirus Z as described herein comprises an amino acid sequence that is at least 96% identical to the amino acid sequence of SEQ ID NO:13, SEQ ID NO:14, SEQ ID NO:15, SEQ ID NO:16, SEQ ID NO:17, SEQ ID NO:18, SEQ ID NO:50, SEQ ID NO:57, SEQ ID NO:64, SEQ ID NO:71, SEQ ID NO:78, SEQ ID NO:82, SEQ ID NO:89, SEQ ID NO:96, SEQ ID NO:103, SEQ ID NO:107, SEQ ID NO:111, SEQ ID NO: 118, SEQ ID NO:125, SEQ ID NO:132, or SEQ ID NO:139. In certain embodiments, the arenavirus Z as described herein comprises an amino acid sequence that is at least 97% identical to the amino acid sequence of SEQ ID NO:13, SEQ ID NO:14, SEQ ID NO:15, SEQ ID NO:16, SEQ ID NO:17, SEQ ID NO:18, SEQ ID NO:50, SEQ ID NO:57, SEQ ID NO:64, SEQ ID NO:71, SEQ ID NO:78, SEQ ID NO:82, SEQ ID NO:89, SEQ ID NO:96, SEQ ID NO:103, SEQ ID NO:107, SEQ ID NO:111, SEQ ID NO: 118, SEQ ID NO:125, SEQ ID NO:132, or SEQ ID NO:139. In certain embodiments, the arenavirus Z as described herein comprises an amino acid sequence that is at least 98% identical to the amino acid sequence of SEQ ID NO:13, SEQ ID NO:14, SEQ ID NO:15, SEQ ID NO:16, SEQ ID NO:17, SEQ ID NO:18, SEQ ID NO:50, SEQ ID NO:57, SEQ ID NO:64, SEQ ID NO:71, SEQ ID NO:78, SEQ ID NO:82, SEQ ID NO:89, SEQ ID NO:96, SEQ ID NO:103, SEQ ID NO:107, SEQ ID NO:111, SEQ ID NO: 118, SEQ ID NO:125, SEQ ID NO:132, or SEQ ID NO:139. In certain embodiments, the arenavirus Z as described herein comprises an amino acid sequence that is at least 99% identical to the amino acid sequence of SEQ ID NO:13, SEQ ID NO:14, SEQ ID NO:15, SEQ ID NO:16, SEQ ID NO:17, SEQ ID NO:18, SEQ ID NO:50, SEQ ID NO:57, SEQ ID NO:64, SEQ ID NO:71, SEQ ID NO:78, SEQ ID NO:82, SEQ ID NO:89, SEQ ID NO:96, SEQ ID NO:103, SEQ ID NO:107, SEQ ID NO:111, SEQ ID NO: 118, SEQ ID NO:125, SEQ ID NO:132, or SEQ ID NO:139. In certain embodiments, the arenavirus Z as described herein comprises an amino acid sequence that is 100% identical to the amino acid sequence of SEQ ID NO:13, SEQ ID NO:14, SEQ ID NO:15, SEQ ID NO:16, SEQ ID NO:17, SEQ ID NO:18, SEQ ID NO:50, SEQ ID NO:57, SEQ ID NO:64, SEQ ID NO:71, SEQ ID NO:78, SEQ ID NO:82, SEQ ID NO:89, SEQ ID NO:96, SEQ ID NO:103, SEQ ID NO:107, SEQ ID NO:111, SEQ ID NO: 118, SEQ ID NO:125, SEQ ID NO:132, or SEQ ID NO:139. In certain embodiments, the arenavirus Z as described herein comprises an amino acid sequence that is 80% identical to the amino acid sequence of SEQ ID NO:13, SEQ ID NO:14, SEQ ID NO:15, SEQ ID NO:16, SEQ ID NO:17, SEQ ID NO:18, SEQ ID NO:50, SEQ ID NO:57, SEQ ID NO:64, SEQ ID NO:71, SEQ ID NO:78, SEQ ID NO:82, SEQ ID NO:89, SEQ ID NO:96, SEQ ID NO:103, SEQ ID NO:107, SEQ ID NO:111, SEQ ID NO: 118, SEQ ID NO:125, SEQ ID NO:132, or SEQ ID NO:139. In certain embodiments, the arenavirus Z as described herein comprises an amino acid sequence that is 85% identical to the amino acid sequence of SEQ ID NO:13, SEQ ID NO:14, SEQ ID NO:15, SEQ ID NO:16, SEQ ID NO:17, SEQ ID NO:18, SEQ ID NO:50, SEQ ID NO:57, SEQ ID NO:64, SEQ ID NO:71, SEQ ID NO:78, SEQ ID NO:82, SEQ ID NO:89, SEQ ID NO:96, SEQ ID NO:103, SEQ ID NO:107, SEQ ID NO:111, SEQ ID NO: 118, SEQ ID NO:125, SEQ ID NO:132, or SEQ ID NO:139. In certain embodiments, the arenavirus Z as described herein comprises an amino acid sequence that is 90% identical to the amino acid sequence of SEQ ID NO:13, SEQ ID NO:14, SEQ ID NO:15, SEQ ID NO:16, SEQ ID NO:17, SEQ ID NO:18, SEQ ID NO:50, SEQ ID NO:57, SEQ ID NO:64, SEQ ID NO:71, SEQ ID NO:78, SEQ ID NO:82, SEQ ID NO:89, SEQ ID NO:96, SEQ ID NO:103, SEQ ID NO:107, SEQ ID NO:111, SEQ ID NO: 118, SEQ ID NO:125, SEQ ID NO:132, or SEQ ID NO:139. In certain embodiments, the arenavirus Z as described herein comprises an amino acid sequence that is 95% identical to the amino acid sequence of SEQ ID NO:13, SEQ ID NO:14, SEQ ID NO:15, SEQ ID NO:16, SEQ ID NO:17, SEQ ID NO:18, SEQ ID NO:50, SEQ ID NO:57, SEQ ID NO:64, SEQ ID NO:71, SEQ ID NO:78, SEQ ID NO:82, SEQ ID NO:89, SEQ ID NO:96, SEQ ID NO:103, SEQ ID NO:107, SEQ ID NO:111, SEQ ID NO: 118, SEQ ID NO:125, SEQ ID NO:132, or SEQ ID NO:139. In certain embodiments, the arenavirus Z as described herein comprises an amino acid sequence that is 96% identical to the amino acid sequence of SEQ ID NO:13, SEQ ID NO:14, SEQ ID NO:15, SEQ ID NO:16, SEQ ID NO:17, SEQ ID NO:18, SEQ ID NO:50, SEQ ID NO:57, SEQ ID NO:64, SEQ ID NO:71, SEQ ID NO:78, SEQ ID NO:82, SEQ ID NO:89, SEQ ID NO:96, SEQ ID NO:103, SEQ ID NO:107, SEQ ID NO:111, SEQ ID NO: 118, SEQ ID NO:125, SEQ ID NO:132, or SEQ ID NO:139. In certain embodiments, the arenavirus Z as described herein comprises an amino acid sequence that is 97% identical to the amino acid sequence of SEQ ID NO:13, SEQ ID NO:14, SEQ ID NO:15, SEQ ID NO:16, SEQ ID NO:17, SEQ ID NO:18, SEQ ID NO:50, SEQ ID NO:57, SEQ ID NO:64, SEQ ID NO:71, SEQ ID NO:78, SEQ ID NO:82, SEQ ID NO:89, SEQ ID NO:96, SEQ ID NO:103, SEQ ID NO:107, SEQ ID NO:111, SEQ ID NO: 118, SEQ ID NO:125, SEQ ID NO:132, or SEQ ID NO:139. In certain embodiments, the arenavirus Z as described herein comprises an amino acid sequence that is 98% identical to the amino acid sequence of SEQ ID NO:13, SEQ ID NO:14, SEQ ID NO:15, SEQ ID NO:16, SEQ ID NO:17, SEQ ID NO:18, SEQ ID NO:50, SEQ ID NO:57, SEQ ID NO:64, SEQ ID NO:71, SEQ ID NO:78, SEQ ID NO:82, SEQ ID NO:89, SEQ ID NO:96, SEQ ID NO:103, SEQ ID NO:107, SEQ ID NO:111, SEQ ID NO: 118, SEQ ID NO:125, SEQ ID NO:132, or SEQ ID NO:139. In certain embodiments, the arenavirus Z as described herein comprises an amino acid sequence that is 99% identical to the amino acid sequence of SEQ ID NO:13, SEQ ID NO:14, SEQ ID NO:15, SEQ ID NO:16, SEQ ID NO:17, SEQ ID NO:18, SEQ ID NO:50, SEQ ID NO:57, SEQ ID NO:64, SEQ ID NO:71, SEQ ID NO:78, SEQ ID NO:82, SEQ ID NO:89, SEQ ID NO:96, SEQ ID NO:103, SEQ ID NO:107, SEQ ID NO:111, SEQ ID NO: 118, SEQ ID NO:125, SEQ ID NO:132, or SEQ ID NO:139.

[0209] In certain embodiments, the polypeptide as described herein is arenavirus L, namely arenavirus L protein or any L protein precursor. In certain embodiments, the polypeptide described herein is a wild-type arenavirus L protein or any wild-type L protein precursor. In other embodiments, the polypeptide described herein is a recombinant arenavirus L protein or any recombinant L protein precursor. In certain embodiments, the arenavirus L is arenavirus L protein or any L protein precursor of LCMV, Lassa virus, Pichinde virus, Oliveros virus, Tamiami virus, Mobala virus, Mopeia virus, Ippy virus, Amapari virus, Flexal virus, Guanarito virus, Latino virus, Machupo virus, Parana virus, Pirital virus, Sabia virus, Tacaribe virus, Bear Canyon virus, Whitewater Arroyo virus, Allpahuayo virus (ALLV), Alxa virus, Chapare virus, Lijiang virus, Cupixi virus, Gairo virus, Loei River virus, Lujo virus, Luna virus, Luli virus, Lunk virus, Mariental virus, Merino Walk virus, Morogoro virus, Okahandja virus, Aporé virus, Ryukyu virus, Solwezi virus, souris virus, Wenzhou virus, Big Brushy Tank virus, Catarina virus, Skinner Tank virus, Tonto Creek virus, Xapuri virus, or Junin virus. In certain embodiments, the arenavirus L as described herein comprises an amino acid sequence that is at least 80%, 85%, 90%, 95%, 96%, 97%, 98%, 99% or 100% identical to the amino acid sequence of SEQ ID NO:19, SEQ ID NO:20, SEQ ID NO:21, SEQ ID NO:22, SEQ ID NO:23, SEQ ID NO:24, SEQ ID NO:51, SEQ ID NO:58, SEQ ID NO:65, SEQ ID NO:72, SEQ ID NO:79, SEQ ID NO:83, SEQ ID NO:90, SEQ ID NO:97, SEQ ID NO:104, SEQ ID NO:108, SEQ ID NO: 112, SEQ ID NO: 119, SEQ ID NO:126, SEQ ID NO:133, or SEQ ID NO:140. In certain embodiments, the arenavirus L as described herein comprises an amino acid sequence that is at least 80% identical to the amino acid sequence of SEQ ID NO:19, SEQ ID NO:20, SEQ ID NO:21, SEQ ID NO:22, SEQ ID NO:23, SEQ ID NO:24, SEQ ID NO:51, SEQ ID NO:58, SEQ ID NO:65, SEQ ID NO:72, SEQ ID NO:79, SEQ ID NO:83, SEQ ID NO:90, SEQ ID NO:97, SEQ ID NO:104, SEQ ID NO:108, SEQ ID NO: 112, SEQ ID NO: 119, SEQ ID NO:126, SEQ ID NO:133, or SEQ ID NO:140. In certain embodiments, the arenavirus L as described herein comprises an amino acid sequence that is at least 85% identical to the amino acid sequence of SEQ ID NO:19, SEQ ID NO:20, SEQ ID NO:21, SEQ ID NO:22, SEQ ID NO:23, SEQ ID NO:24, SEQ ID NO:51, SEQ ID NO:58, SEQ ID NO:65, SEQ ID NO:72, SEQ ID NO:79, SEQ ID NO:83, SEQ ID NO:90, SEQ ID NO:97, SEQ ID NO:104, SEQ ID NO:108, SEQ ID NO: 112, SEQ ID NO: 119, SEQ ID NO:126, SEQ ID NO:133, or SEQ ID NO:140. In certain embodiments, the arenavirus L as described herein comprises an amino acid sequence that is at least 90% identical to the amino acid sequence of SEQ ID NO:19, SEQ ID NO:20, SEQ ID NO:21, SEQ ID NO:22, SEQ ID NO:23, SEQ ID NO:24, SEQ ID NO:51, SEQ ID NO:58, SEQ ID NO:65, SEQ ID NO:72, SEQ ID NO:79, SEQ ID NO:83, SEQ ID NO:90, SEQ ID NO:97, SEQ ID NO:104, SEQ ID NO:108, SEQ ID NO:112, SEQ ID NO:119, SEQ ID NO:126, SEQ ID NO:133, or SEQ ID NO:140. In certain embodiments, the arenavirus L as described herein comprises an amino acid sequence that is at least 95% identical to the amino acid sequence of SEQ ID NO:19, SEQ ID NO:20, SEQ ID NO:21, SEQ ID NO:22, SEQ ID NO:23, SEQ ID NO:24, SEQ ID NO:51, SEQ ID NO:58, SEQ ID NO:65, SEQ ID NO:72, SEQ ID NO:79, SEQ ID NO:83, SEQ ID NO:90, SEQ ID NO:97, SEQ ID NO:104, SEQ ID NO:108, SEQ ID NO: 112, SEQ ID NO: 119, SEQ ID NO:126, SEQ ID NO:133, or SEQ ID NO:140. In certain embodiments, the arenavirus L as described herein comprises an amino acid sequence that is at least 96% identical to the amino acid sequence of SEQ ID NO:19, SEQ ID NO:20, SEQ ID NO:21, SEQ ID NO:22, SEQ ID NO:23, SEQ ID NO:24, SEQ ID NO:51, SEQ ID NO:58, SEQ ID NO:65, SEQ ID NO:72, SEQ ID NO:79, SEQ ID NO:83, SEQ ID NO:90, SEQ ID NO:97, SEQ ID NO:104, SEQ ID NO:108, SEQ ID NO: 112, SEQ ID NO: 119, SEQ ID NO:126, SEQ ID NO:133, or SEQ ID NO:140. In certain embodiments, the arenavirus L as described herein comprises an amino acid sequence that is at least 97% identical to the amino acid sequence of SEQ ID NO:19, SEQ ID NO:20, SEQ ID NO:21, SEQ ID NO:22, SEQ ID NO:23, SEQ ID NO:24, SEQ ID NO:51, SEQ ID NO:58, SEQ ID NO:65, SEQ ID NO:72, SEQ ID NO:79, SEQ ID NO:83, SEQ ID NO:90, SEQ ID NO:97, SEQ ID NO:104, SEQ ID NO:108, SEQ ID NO:112, SEQ ID NO:119, SEQ ID NO:126, SEQ ID NO:133, or SEQ ID NO:140. In certain embodiments, the arenavirus L as described herein comprises an amino acid sequence that is at least 98% identical to the amino acid sequence of SEQ ID NO:19, SEQ ID NO:20, SEQ ID NO:21, SEQ ID NO:22, SEQ ID NO:23, SEQ ID NO:24, SEQ ID NO:51, SEQ ID NO:58, SEQ ID NO:65, SEQ ID NO:72, SEQ ID NO:79, SEQ ID NO:83, SEQ ID NO:90, SEQ ID NO:97, SEQ ID NO:104, SEQ ID NO:108, SEQ ID NO: 112, SEQ ID NO: 119, SEQ ID NO:126, SEQ ID NO:133, or SEQ ID NO:140. In certain embodiments, the arenavirus L as described herein comprises an amino acid sequence that is at least 99% identical to the amino acid sequence of SEQ ID NO:19, SEQ ID NO:20, SEQ ID NO:21, SEQ ID NO:22, SEQ ID NO:23, SEQ ID NO:24, SEQ ID NO:51, SEQ ID NO:58, SEQ ID NO:65, SEQ ID NO:72, SEQ ID NO:79, SEQ ID NO:83, SEQ ID NO:90, SEQ ID NO:97, SEQ ID NO:104, SEQ ID NO:108, SEQ ID NO: 112, SEQ ID NO: 119, SEQ ID NO:126, SEQ ID NO:133, or SEQ ID NO:140. In certain embodiments, the arenavirus L as described herein comprises an amino acid sequence that is 100% identical to the amino acid sequence of SEQ ID NO:19, SEQ ID NO:20, SEQ ID NO:21, SEQ ID NO:22, SEQ ID NO:23, SEQ ID NO:24, SEQ ID NO:51, SEQ ID NO:58, SEQ ID NO:65, SEQ ID NO:72, SEQ ID NO:79, SEQ ID NO:83, SEQ ID NO:90, SEQ ID NO:97, SEQ ID NO:104, SEQ ID NO:108, SEQ ID NO:112, SEQ ID NO:119, SEQ ID NO:126, SEQ ID NO:133, or SEQ ID NO:140. In certain embodiments, the arenavirus L as described herein comprises an amino acid sequence that is 80% identical to the amino acid sequence of SEQ ID NO:19, SEQ ID NO:20, SEQ ID NO:21, SEQ ID NO:22, SEQ ID NO:23, SEQ ID NO:24, SEQ ID NO:51, SEQ ID NO:58, SEQ ID NO:65, SEQ ID NO:72, SEQ ID NO:79, SEQ ID NO:83, SEQ ID NO:90, SEQ ID NO:97, SEQ ID NO:104, SEQ ID NO:108, SEQ ID NO: 112, SEQ ID NO: 119, SEQ ID NO:126, SEQ ID NO:133, or SEQ ID NO:140. In certain embodiments, the arenavirus L as described herein comprises an amino acid sequence that is 85% identical to the amino acid sequence of SEQ ID NO:19, SEQ ID NO:20, SEQ ID NO:21, SEQ ID NO:22, SEQ ID NO:23, SEQ ID NO:24, SEQ ID NO:51, SEQ ID NO:58, SEQ ID NO:65, SEQ ID NO:72, SEQ ID NO:79, SEQ ID NO:83, SEQ ID NO:90, SEQ ID NO:97, SEQ ID NO:104, SEQ ID NO:108, SEQ ID NO: 112, SEQ ID NO: 119, SEQ ID NO:126, SEQ ID NO:133, or SEQ ID NO:140. In certain embodiments, the arenavirus L as described herein comprises an amino acid sequence that is 90% identical to the amino acid sequence of SEQ ID NO:19, SEQ ID NO:20, SEQ ID NO:21, SEQ ID NO:22, SEQ ID NO:23, SEQ ID NO:24, SEQ ID NO:51, SEQ ID NO:58, SEQ ID NO:65, SEQ ID NO:72, SEQ ID NO:79, SEQ ID NO:83, SEQ ID NO:90, SEQ ID NO:97, SEQ ID NO:104, SEQ ID NO:108, SEQ ID NO: 112, SEQ ID NO: 119, SEQ ID NO:126, SEQ ID NO:133, or SEQ ID NO:140. In certain embodiments, the arenavirus L as described herein comprises an amino acid sequence that is 95% identical to the amino acid sequence of SEQ ID NO:19, SEQ ID NO:20, SEQ ID NO:21, SEQ ID NO:22, SEQ ID NO:23, SEQ ID NO:24, SEQ ID NO:51, SEQ ID NO:58, SEQ ID NO:65, SEQ ID NO:72, SEQ ID NO:79, SEQ ID NO:83, SEQ ID NO:90, SEQ ID NO:97, SEQ ID NO:104, SEQ ID NO:108, SEQ ID NO: 112, SEQ ID NO: 119, SEQ ID NO:126, SEQ ID NO:133, or SEQ ID NO:140. In certain embodiments, the arenavirus L as described herein comprises an amino acid sequence that is 96% identical to the amino acid sequence of SEQ ID NO:19, SEQ ID NO:20, SEQ ID NO:21, SEQ ID NO:22, SEQ ID NO:23, SEQ ID NO:24, SEQ ID NO:51, SEQ ID NO:58, SEQ ID NO:65, SEQ ID NO:72, SEQ ID NO:79, SEQ ID NO:83, SEQ ID NO:90, SEQ ID NO:97, SEQ ID NO:104, SEQ ID NO:108, SEQ ID NO:112, SEQ ID NO:119, SEQ ID NO:126, SEQ ID NO:133, or SEQ ID NO:140. In certain embodiments, the arenavirus L as described herein comprises an amino acid sequence that is 97% identical to the amino acid sequence of SEQ ID NO:19, SEQ ID NO:20, SEQ ID NO:21, SEQ ID NO:22, SEQ ID NO:23, SEQ ID NO:24, SEQ ID NO:51, SEQ ID NO:58, SEQ ID NO:65, SEQ ID NO:72, SEQ ID NO:79, SEQ ID NO:83, SEQ ID NO:90, SEQ ID NO:97, SEQ ID NO:104, SEQ ID NO:108, SEQ ID NO: 112, SEQ ID NO: 119, SEQ ID NO:126, SEQ ID NO:133, or SEQ ID NO:140. In certain embodiments, the arenavirus L as described herein comprises an amino acid sequence that is 98% identical to the amino acid sequence of SEQ ID NO:19, SEQ ID NO:20, SEQ ID NO:21, SEQ ID NO:22, SEQ ID NO:23, SEQ ID NO:24, SEQ ID NO:51, SEQ ID NO:58, SEQ ID NO:65, SEQ ID NO:72, SEQ ID NO:79, SEQ ID NO:83, SEQ ID NO:90, SEQ ID NO:97, SEQ ID NO:104, SEQ ID NO:108, SEQ ID NO: 112, SEQ ID NO: 119, SEQ ID NO:126, SEQ ID NO:133, or SEQ ID NO:140. In certain embodiments, the arenavirus L as described herein comprises an amino acid sequence that is 99% identical to the amino acid sequence of SEQ ID NO:19, SEQ ID NO:20, SEQ ID NO:21, SEQ ID NO:22, SEQ ID NO:23, SEQ ID NO:24, SEQ ID NO:51, SEQ ID NO:58, SEQ ID NO:65, SEQ ID NO:72, SEQ ID NO:79, SEQ ID NO:83, SEQ ID NO:90, SEQ ID NO:97, SEQ ID NO:104, SEQ ID NO:108, SEQ ID NO: 112, SEQ ID NO: 119, SEQ ID NO:126, SEQ ID NO:133, or SEQ ID NO:140.

### 5.2 Functional Fragment Provided Herein

[0210] The functional fragment to be used in the compositions and methods described herein is a fragment of a polypeptide. The functional fragment of a polypeptide as described herein is not the full-length polypeptide.

[0211] In certain embodiments, the functional fragment may possess one or more functions that is known to a person of ordinary skills in the art. In certain embodiments, the functional fragment may possess the biological functions of the polypeptide from which the functional fragment is derived, for example the biological functions required for growth of the arenavirus particle. In certain embodiments, the functional fragment can support the biological functions of the polypeptide from which it is derived as a separated fragment independent of the context of the full-length polypeptide. In an exemplary embodiment, the functional fragment may be a signal peptide that possesses a function of mediating the insertion of glycoprotein precursor into the membrane of the endoplasmic reticulum (ER). In further embodiments, besides mediating the insertion of glycoprotein precursor into the membrane of the ER, the signal peptide may possess other functions, for example mediating cleavage of the polypeptide and/or acting as a trans-acting maturation factor. In other embodiments, the functional fragment may not possess any function that is known to a person of ordinary skills in the art.

[0212] In certain embodiments, the functional fragment may be 5, 8, 10, 12, 15, 18, 20, 22, 25, 28, 30, 32, 35, 38, 40, 42, 45, 48, 50, 52, 55, 58, 60, 65, 70, 75, 80, 85, 90, 95, 100, 150, 200, 250, or 300 amino acids in length. In certain embodiments, the functional fragment is 5 to 10 amino acids in length, 10 to 25 amino acids in length, 25 to 50 amino acids in length, 50 to 100 amino acids in length, 100 to 150 amino acids in length, 150 to 200 amino acids in length, 200 to 250 amino acids in length, 250 to 300 amino acids in length, 300 to 400 amino acids in length, 400 to 500 amino acids in length, 500 to 750 amino acids in length, 750 to 1000 amino acids in length, 1000 to 1250 amino acids in length, 1250 to 1500 amino acids in length, 1500 to 1750 amino acids in length, 1750 to 2000 amino acids in length, 2000 to 2500 amino acids in length, or more than 2500 or more amino acids in length. In certain embodiments, the functional fragment does not exceed 2500 amino acids in length.

[0213] In certain embodiments, the functional fragment may consist of 5, 8, 10, 12, 15, 18, 20, 22, 25, 28, 30, 32, 35, 38, 40, 42, 45, 48, 50, 52, 55, 58, 60, 65, 70, 75, 80, 85, 90, 95, 100, 150, 200, 250, or 300 amino-acid residues. In certain embodiments, the functional fragment may consist of 58 amino-acid residues. In certain embodiments, the functional fragment may consist of 193 amino-acid residues. In certain embodiments, the functional fragment may consist of 200 amino-acid residues. In certain embodiments, the functional fragment may consist of 201 amino-acid residues. In certain embodiments, the functional fragment may consist of 207 amino-acid residues. In certain embodiments, the functional fragment may consist of 215 amino-acid residues. In certain embodiments, the functional fragment may consist of 225 amino-acid residues. In certain embodiments, the functional fragment may consist of 232 amino-acid residues. In certain embodiments, the functional fragment may consist of 233 amino-acid residues. In certain embodiments, the functional fragment may consist of 234 amino-acid residues. In certain embodiments, the functional fragment may consist of 235 amino-acid residues. In certain embodiments, the functional fragment may consist of 15 amino-acid residues. In certain embodiments, the functional fragment may consist of 20 amino-acid residues. In certain embodiments, the functional fragment may consist of 1 to 15 amino-acid residues. In certain embodiments, the functional fragment may consist of 2 to 20 amino-acid residues.

[0214] In certain embodiments, the functional fragment is a fragment of arenavirus GP, NP, Z, or L, namely a fragment of arenavirus glycoprotein, nucleoprotein, Z protein, L protein, glycoprotein precursor, nucleoprotein precursor, Z protein precursor, or L protein precursor. In certain embodiments, the functional fragment of arenavirus GP, NP, Z, or L is wild-type. In other embodiments, the functional fragment of arenavirus GP, NP, Z, and L is recombinant. In certain embodiments, the functional fragment of arenavirus GP, NP, Z, or L is mutated. In certain embodiments, the functional fragment of arenavirus GP, NP, Z, or L is derived from an attenuated virus.

[0215] In certain embodiments, the functional fragment is a fragment of wild-type arenavirus glycoprotein, nucleoprotein, Z protein, or L protein. In certain embodiments, the functional fragment is a fragment of wild-type arenavirus glycoprotein. In certain embodiments, the functional fragment is a fragment of wild-type arenavirus nucleoprotein. In certain embodiments, the functional fragment is a fragment of wild-type arenavirus Z protein. In certain embodiments, the functional fragment is a fragment of wild-type arenavirus L protein.

[0216] In certain embodiments, the functional fragment is a fragment of wild-type arenavirus glycoprotein precursor, nucleoprotein precursor, Z protein precursor, or L protein precursor. In certain embodiments, the functional fragment is a fragment of wild-type arenavirus glycoprotein precursor. In certain embodiments, the wild-type arenavirus glycoprotein precursor can be processed into a GP signal peptide, a GP1 and a GP2. In certain embodiments, the functional fragment is a fragment of wild-type arenavirus nucleoprotein precursor. In certain embodiments, the functional fragment is a fragment of wild-type arenavirus Z protein precursor. In certain embodiments, the functional fragment is a fragment of wild-type arenavirus L protein precursor.

[0217] In certain embodiments, the functional fragment is a fragment of recombinant arenavirus glycoprotein, nucleoprotein, Z protein or L protein. In certain embodiments, the functional fragment is a fragment of recombinant arenavirus glycoprotein. In certain embodiments, the functional fragment is a fragment of recombinant arenavirus nucleoprotein. In certain embodiments, the functional fragment is a fragment of recombinant arenavirus Z protein. In certain embodiments, the functional fragment is a fragment of recombinant arenavirus L protein.

[0218] In certain embodiments, the functional fragment is recombinant arenavirus glycoprotein precursor, nucleoprotein precursor, Z protein precursor or L protein precursor. In certain embodiments, the functional fragment is a fragment of recombinant arenavirus glycoprotein precursor. In certain embodiments, the arenavirus glycoprotein precursor can be processed into a GP signal peptide, a GP1 and a GP2, one or more of which may be recombinant. In certain embodiments, the functional fragment is a fragment of recombinant arenavirus nucleoprotein precursor. In certain embodiments, the functional fragment is a fragment of recombinant arenavirus Z protein precursor. In certain embodiments, the functional fragment is a fragment of recombinant arenavirus L protein precursor.

[0219] In certain embodiments, the functional fragment is a fragment of mutated arenavirus glycoprotein, nucleoprotein, Z protein or L protein. In certain embodiments, the functional fragment is a fragment of mutated arenavirus glycoprotein. In certain embodiments, the functional fragment is a fragment of mutated arenavirus nucleoprotein. In certain embodiments, the functional fragment is a fragment of mutated arenavirus Z protein. In certain embodiments, the functional fragment is a fragment of mutated arenavirus L protein.

[0220] In certain embodiments, the functional fragment is mutated arenavirus glycoprotein precursor, nucleoprotein precursor, Z protein precursor or L protein precursor. In certain embodiments, the functional fragment is a fragment of mutated arenavirus glycoprotein precursor. In certain embodiments, the arenavirus glycoprotein precursor can be processed into a GP signal peptide, a GP1 and a GP2, one or more of which may be mutated. In certain embodiments, the functional fragment is a fragment of mutated arenavirus nucleoprotein precursor. In certain embodiments, the functional fragment is a fragment of mutated arenavirus Z protein precursor. In certain embodiments, the functional fragment is a fragment of mutated arenavirus L protein precursor.

[0221] In certain embodiments, the functional fragment is a fragment of arenavirus glycoprotein, nucleoprotein, Z protein or L protein that is derived from an attenuated virus. In certain embodiments, the functional fragment is a fragment of arenavirus glycoprotein derived from an attenuated virus. In certain embodiments, the functional fragment is a fragment of arenavirus nucleoprotein derived from an attenuated virus. In certain embodiments, the functional fragment is a fragment of arenavirus Z protein derived from an attenuated virus. In certain embodiments, the functional fragment is a fragment of arenavirus L protein derived from an attenuated virus.

[0222] In certain embodiments, the functional fragment is arenavirus glycoprotein precursor, nucleoprotein precursor, Z protein precursor or L protein precursor that is derived from an attenuated virus. In certain embodiments, the functional fragment is a fragment of arenavirus glycoprotein precursor derived from an attenuated virus. In certain embodiments, the arenavirus glycoprotein precursor can be processed into a GP signal peptide, a GP1 and a GP2, one or more of which may be derived from an attenuated virus. In certain embodiments, the functional fragment is a fragment of arenavirus nucleoprotein precursor derived from an attenuated virus. In certain embodiments, the functional fragment is a fragment of arenavirus Z protein precursor derived from an attenuated virus. In certain embodiments, the functional fragment is a fragment of arenavirus L protein precursor derived from an attenuated virus.

[0223] In certain embodiments, the functional fragment is a fragment of arenavirus glycoprotein precursor. In certain embodiments, the functional fragment is arenavirus GP signal peptide. In certain embodiments, the arenavirus GP signal peptide as described herein comprises an amino acid sequence that is at least 80%, 85%, 90%, 95%, 96%, 97%, 98%, 99% or 100% identical to the amino acid sequence of SEQ ID NO:25, SEQ ID NO:26, SEQ ID NO:27, SEQ ID NO:28, SEQ ID NO:29, SEQ ID NO:30, SEQ ID NO:53, SEQ ID NO:60, SEQ ID NO:67, SEQ ID NO:74, SEQ ID NO:85, SEQ ID NO:92, SEQ ID NO:99, SEQ ID NO:114, SEQ ID NO:121, SEQ ID NO:128, or SEQ ID NO:135. In certain embodiments, the arenavirus GP signal peptide as described herein comprises an amino acid sequence that is at least 80% identical to the amino acid sequence of SEQ ID NO:25, SEQ ID NO:26, SEQ ID NO:27, SEQ ID NO:28, SEQ ID NO:29, SEQ ID NO:30, SEQ ID NO:53, SEQ ID NO:60, SEQ ID NO:67, SEQ ID NO:74, SEQ ID NO:85, SEQ ID NO:92, SEQ ID NO:99, SEQ ID NO:114, SEQ ID NO:121, SEQ ID NO:128, or SEQ ID NO:135. In certain embodiments, the arenavirus GP signal peptide as described herein comprises an amino acid sequence that is at least 85% identical to the amino acid sequence of SEQ ID NO:25, SEQ ID NO:26, SEQ ID NO:27, SEQ ID NO:28, SEQ ID NO:29, SEQ ID NO:30, SEQ ID NO:53, SEQ ID NO:60, SEQ ID NO:67, SEQ ID NO:74, SEQ ID NO:85, SEQ ID NO:92, SEQ ID NO:99, SEQ ID NO:114, SEQ ID NO:121, SEQ ID NO:128, or SEQ ID NO:135. In certain embodiments, the arenavirus GP signal peptide as described herein comprises an amino acid sequence that is at least 90% identical to the amino acid sequence of SEQ ID NO:25, SEQ ID NO:26, SEQ ID NO:27, SEQ ID NO:28, SEQ ID NO:29, SEQ ID NO:30, SEQ ID NO:53, SEQ ID NO:60, SEQ ID NO:67, SEQ ID NO:74, SEQ ID NO:85, SEQ ID NO:92, SEQ ID NO:99, SEQ ID NO:114, SEQ ID NO:121, SEQ ID NO:128, or SEQ ID NO:135. In certain embodiments, the arenavirus GP signal peptide as described herein comprises an amino acid sequence that is at least 95% identical to the amino acid sequence of SEQ ID NO:25, SEQ ID NO:26, SEQ ID NO:27, SEQ ID NO:28, SEQ ID NO:29, SEQ ID NO:30, SEQ ID NO:53, SEQ ID NO:60, SEQ ID NO:67, SEQ ID NO:74, SEQ ID NO:85, SEQ ID NO:92, SEQ ID NO:99, SEQ ID NO:114, SEQ ID NO:121, SEQ ID NO:128, or SEQ ID NO:135. In certain embodiments, the arenavirus GP signal peptide as described herein comprises an amino acid sequence that is at least 96% identical to the amino acid sequence of SEQ ID NO:25, SEQ ID NO:26, SEQ ID NO:27, SEQ ID NO:28, SEQ ID NO:29, SEQ ID NO:30, SEQ ID NO:53, SEQ ID NO:60, SEQ ID NO:67, SEQ ID NO:74, SEQ ID NO:85, SEQ ID NO:92, SEQ ID NO:99, SEQ ID NO:114, SEQ ID NO:121, SEQ ID NO:128, or SEQ ID NO:135. In certain embodiments, the arenavirus GP signal peptide as described herein comprises an amino acid sequence that is at least 97% identical to the amino acid sequence of SEQ ID NO:25, SEQ ID NO:26, SEQ ID NO:27, SEQ ID NO:28, SEQ ID NO:29, SEQ ID NO:30, SEQ ID NO:53, SEQ ID NO:60, SEQ ID NO:67, SEQ ID NO:74, SEQ ID NO:85, SEQ ID NO:92, SEQ ID NO:99, SEQ ID NO:114, SEQ ID NO:121, SEQ ID NO:128, or SEQ ID NO:135. In certain embodiments, the arenavirus GP signal peptide as described herein comprises an amino acid sequence that is at least 98% identical to the amino acid sequence of SEQ ID NO:25, SEQ ID NO:26, SEQ ID NO:27, SEQ ID NO:28, SEQ ID NO:29, SEQ ID NO:30, SEQ ID NO:53, SEQ ID NO:60, SEQ ID NO:67, SEQ ID NO:74, SEQ ID NO:85, SEQ ID NO:92, SEQ ID NO:99, SEQ ID NO:114, SEQ ID NO:121, SEQ ID NO:128, or SEQ ID NO:135. In certain embodiments, the arenavirus GP signal peptide as described herein comprises an amino acid sequence that is at least 99% identical to the amino acid sequence of SEQ ID NO:25, SEQ ID NO:26, SEQ ID NO:27, SEQ ID NO:28, SEQ ID NO:29, SEQ ID NO:30, SEQ ID NO:53, SEQ ID NO:60, SEQ ID NO:67, SEQ ID NO:74, SEQ ID NO:85, SEQ ID NO:92, SEQ ID NO:99, SEQ ID NO:114, SEQ ID NO:121, SEQ ID NO:128, or SEQ ID NO:135. In certain embodiments, the arenavirus GP signal peptide as described herein comprises an amino acid sequence that is 100% identical to the amino acid sequence of SEQ ID NO:25, SEQ ID NO:26, SEQ ID NO:27, SEQ ID NO:28, SEQ ID NO:29, SEQ ID NO:30, SEQ ID NO:53, SEQ ID NO:60, SEQ ID NO:67, SEQ ID NO:74, SEQ ID NO:85, SEQ ID NO:92, SEQ ID NO:99, SEQ ID NO:114, SEQ ID NO:121, SEQ ID NO:128, or SEQ ID NO:135. In certain embodiments, the arenavirus GP signal peptide as described herein comprises an amino acid sequence that is 80% identical to the amino acid sequence of SEQ ID NO:25, SEQ ID NO:26, SEQ ID NO:27, SEQ ID NO:28, SEQ ID NO:29, SEQ ID NO:30, SEQ ID NO:53, SEQ ID NO:60, SEQ ID NO:67, SEQ ID NO:74, SEQ ID NO:85, SEQ ID NO:92, SEQ ID NO:99, SEQ ID NO:114, SEQ ID NO:121, SEQ ID NO:128, or SEQ ID NO:135. In certain embodiments, the arenavirus GP signal peptide as described herein comprises an amino acid sequence that is 85% identical to the amino acid sequence of SEQ ID NO:25, SEQ ID NO:26, SEQ ID NO:27, SEQ ID NO:28, SEQ ID NO:29, SEQ ID NO:30, SEQ ID NO:53, SEQ ID NO:60, SEQ ID NO:67, SEQ ID NO:74, SEQ ID NO:85, SEQ ID NO:92, SEQ ID NO:99, SEQ ID NO:114, SEQ ID NO:121, SEQ ID NO:128, or SEQ ID NO:135. In certain embodiments, the arenavirus GP signal peptide as described herein comprises an amino acid sequence that is 90% identical to the amino acid sequence of SEQ ID NO:25, SEQ ID NO:26, SEQ ID NO:27, SEQ ID NO:28, SEQ ID NO:29, SEQ ID NO:30, SEQ ID NO:53, SEQ ID NO:60, SEQ ID NO:67, SEQ ID NO:74, SEQ ID NO:85, SEQ ID NO:92, SEQ ID NO:99, SEQ ID NO:114, SEQ ID NO:121, SEQ ID NO:128, or SEQ ID NO:135. In certain embodiments, the arenavirus GP signal peptide as described herein comprises an amino acid sequence that is 95% identical to the amino acid sequence of SEQ ID NO:25, SEQ ID NO:26, SEQ ID NO:27, SEQ ID NO:28, SEQ ID NO:29, SEQ ID NO:30, SEQ ID NO:53, SEQ ID NO:60, SEQ ID NO:67, SEQ ID NO:74, SEQ ID NO:85, SEQ ID NO:92, SEQ ID NO:99, SEQ ID NO:114, SEQ ID NO:121, SEQ ID NO:128, or SEQ ID NO:135. In certain embodiments, the arenavirus GP signal peptide as described herein comprises an amino acid sequence that is 96% identical to the amino acid sequence of SEQ ID NO:25, SEQ ID NO:26, SEQ ID NO:27, SEQ ID NO:28, SEQ ID NO:29, SEQ ID NO:30, SEQ ID NO:53, SEQ ID NO:60, SEQ ID NO:67, SEQ ID NO:74, SEQ ID NO:85, SEQ ID NO:92, SEQ ID NO:99, SEQ ID NO:114, SEQ ID NO:121, SEQ ID NO:128, or SEQ ID NO:135. In certain embodiments, the arenavirus GP signal peptide as described herein comprises an amino acid sequence that is 97% identical to the amino acid sequence of SEQ ID NO:25, SEQ ID NO:26, SEQ ID NO:27, SEQ ID NO:28, SEQ ID NO:29, SEQ ID NO:30, SEQ ID NO:53, SEQ ID NO:60, SEQ ID NO:67, SEQ ID NO:74, SEQ ID NO:85, SEQ ID NO:92, SEQ ID NO:99, SEQ ID NO:114, SEQ ID NO:121, SEQ ID NO:128, or SEQ ID NO:135. In certain embodiments, the arenavirus GP signal peptide as described herein comprises an amino acid sequence that is 98% identical to the amino acid sequence of SEQ ID NO:25, SEQ ID NO:26, SEQ ID NO:27, SEQ ID NO:28, SEQ ID NO:29, SEQ ID NO:30, SEQ ID NO:53, SEQ ID NO:60, SEQ ID NO:67, SEQ ID NO:74, SEQ ID NO:85, SEQ ID NO:92, SEQ ID NO:99, SEQ ID NO:114, SEQ ID NO:121, SEQ ID NO:128, or SEQ ID NO:135. In certain embodiments, the arenavirus GP signal peptide as described herein comprises an amino acid sequence that is 99% identical to the amino acid sequence of SEQ ID NO:25, SEQ ID NO:26, SEQ ID NO:27, SEQ ID NO:28, SEQ ID NO:29, SEQ ID NO:30, SEQ ID NO:53, SEQ ID NO:60, SEQ ID NO:67, SEQ ID NO:74, SEQ ID NO:85, SEQ ID NO:92, SEQ ID NO:99, SEQ ID NO:114, SEQ ID NO:121, SEQ ID NO:128, or SEQ ID NO:135.

[0224] In certain embodiments, the functional fragment is GP1. In certain embodiments, the GP1 as described herein comprises an amino acid sequence that is at least 80%, 85%, 90%, 95%, 96%, 97%, 98%, 99% or 100% identical to the amino acid sequence of SEQ ID NO:31, SEQ ID NO:32, SEQ ID NO:33, SEQ ID NO:142, SEQ ID NO:34, SEQ ID NO:35, SEQ ID NO:36, SEQ ID NO:54, SEQ ID NO:61, SEQ ID NO:68, SEQ ID NO:75, SEQ ID NO:86, SEQ ID NO:93, SEQ ID NO:100, SEQ ID NO:115, SEQ ID NO:122, SEQ ID NO:129, or SEQ ID NO:136. In certain embodiments, the arenavirus GP1 as described herein comprises an amino acid sequence that is at least 80% identical to the amino acid sequence of SEQ ID NO:31, SEQ ID NO:32, SEQ ID NO:33, SEQ ID NO:142, SEQ ID NO:34, SEQ ID NO:35, SEQ ID NO:36, SEQ ID NO:54, SEQ ID NO:61, SEQ ID NO:68, SEQ ID NO:75, SEQ ID NO:86, SEQ ID NO:93, SEQ ID NO:100, SEQ ID NO:115, SEQ ID NO:122, SEQ ID NO:129, or SEQ ID NO:136. In certain embodiments, the arenavirus GP1 as described herein comprises an amino acid sequence that is at least 85% identical to the amino acid sequence of SEQ ID NO:31, SEQ ID NO:32, SEQ ID NO:33, SEQ ID NO:142, SEQ ID NO:34, SEQ ID NO:35, SEQ ID NO:36, SEQ ID NO:54, SEQ ID NO:61, SEQ ID NO:68, SEQ ID NO:75, SEQ ID NO:86, SEQ ID NO:93, SEQ ID NO:100, SEQ ID NO: 115, SEQ ID NO:122, SEQ ID NO:129, or SEQ ID NO:136. In certain embodiments, the arenavirus GP1 as described herein comprises an amino acid sequence that is at least 90% identical to the amino acid sequence of SEQ ID NO:31, SEQ ID NO:32, SEQ ID NO:33, SEQ ID NO:142, SEQ ID NO:34, SEQ ID NO:35, SEQ ID NO:36, SEQ ID NO:54, SEQ ID NO:61, SEQ ID NO:68, SEQ ID NO:75, SEQ ID NO:86, SEQ ID NO:93, SEQ ID NO:100, SEQ ID NO: 115, SEQ ID NO:122, SEQ ID NO:129, or SEQ ID NO:136. In certain embodiments, the arenavirus GP1 as described herein comprises an amino acid sequence that is at least 95% identical to the amino acid sequence of SEQ ID NO:31, SEQ ID NO:32, SEQ ID NO:33, SEQ ID NO:142, SEQ ID NO:34, SEQ ID NO:35, SEQ ID NO:36, SEQ ID NO:54, SEQ ID NO:61, SEQ ID NO:68, SEQ ID NO:75, SEQ ID NO:86, SEQ ID NO:93, SEQ ID NO:100, SEQ ID NO: 115, SEQ ID NO:122, SEQ ID NO:129, or SEQ ID NO:136. In certain embodiments, the arenavirus GP1 as described herein comprises an amino acid sequence that is at least 96% identical to the amino acid sequence of SEQ ID NO:31, SEQ ID NO:32, SEQ ID NO:33, SEQ ID NO:142, SEQ ID NO:34, SEQ ID NO:35, SEQ ID NO:36, SEQ ID NO:54, SEQ ID NO:61, SEQ ID NO:68, SEQ ID NO:75, SEQ ID NO:86, SEQ ID NO:93, SEQ ID NO:100, SEQ ID NO: 115, SEQ ID NO:122, SEQ ID NO:129, or SEQ ID NO:136. In certain embodiments, the arenavirus GP1 as described herein comprises an amino acid sequence that is at least 97% identical to the amino acid sequence of SEQ ID NO:31, SEQ ID NO:32, SEQ ID NO:33, SEQ ID NO:142, SEQ ID NO:34, SEQ ID NO:35, SEQ ID NO:36, SEQ ID NO:54, SEQ ID NO:61, SEQ ID NO:68, SEQ ID NO:75, SEQ ID NO:86, SEQ ID NO:93, SEQ ID NO:100, SEQ ID NO:115, SEQ ID NO:122, SEQ ID NO:129, or SEQ ID NO:136. In certain embodiments, the arenavirus GP1 as described herein comprises an amino acid sequence that is at least 98% identical to the amino acid sequence of SEQ ID NO:31, SEQ ID NO:32, SEQ ID NO:33, SEQ ID NO:142, SEQ ID NO:34, SEQ ID NO:35, SEQ ID NO:36, SEQ ID NO:54, SEQ ID NO:61, SEQ ID NO:68, SEQ ID NO:75, SEQ ID NO:86, SEQ ID NO:93, SEQ ID NO:100, SEQ ID NO:115, SEQ ID NO:122, SEQ ID NO:129, or SEQ ID NO:136. In certain embodiments, the arenavirus GP1 as described herein comprises an amino acid sequence that is at least 99% identical to the amino acid sequence of SEQ ID NO:31, SEQ ID NO:32, SEQ ID NO:33, SEQ ID NO:142, SEQ ID NO:34, SEQ ID NO:35, SEQ ID NO:36, SEQ ID NO:54, SEQ ID NO:61, SEQ ID NO:68, SEQ ID NO:75, SEQ ID NO:86, SEQ ID NO:93, SEQ ID NO:100, SEQ ID NO: 115, SEQ ID NO:122, SEQ ID NO:129, or SEQ ID NO:136. In certain embodiments, the arenavirus GP1 as described herein comprises an amino acid sequence that is 100% identical to the amino acid sequence of SEQ ID NO:31, SEQ ID NO:32, SEQ ID NO:33, SEQ ID NO:142, SEQ ID NO:34, SEQ ID NO:35, SEQ ID NO:36, SEQ ID NO:54, SEQ ID NO:61, SEQ ID NO:68, SEQ ID NO:75, SEQ ID NO:86, SEQ ID NO:93, SEQ ID NO:100, SEQ ID NO: 115, SEQ ID NO:122, SEQ ID NO:129, or SEQ ID NO:136. In certain embodiments, the arenavirus GP1 as described herein comprises an amino acid sequence that is 80% identical to the amino acid sequence of SEQ ID NO:31, SEQ ID NO:32, SEQ ID NO:33, SEQ ID NO:142, SEQ ID NO:34, SEQ ID NO:35, SEQ ID NO:36, SEQ ID NO:54, SEQ ID NO:61, SEQ ID NO:68, SEQ ID NO:75, SEQ ID NO:86, SEQ ID NO:93, SEQ ID NO:100, SEQ ID NO: 115, SEQ ID NO:122, SEQ ID NO:129, or SEQ ID NO:136. In certain embodiments, the arenavirus GP1 as described herein comprises an amino acid sequence that is 85% identical to the amino acid sequence of SEQ ID NO:31, SEQ ID NO:32, SEQ ID NO:33, SEQ ID NO:142, SEQ ID NO:34, SEQ ID NO:35, SEQ ID NO:36, SEQ ID NO:54, SEQ ID NO:61, SEQ ID NO:68, SEQ ID NO:75, SEQ ID NO:86, SEQ ID NO:93, SEQ ID NO:100, SEQ ID NO: 115, SEQ ID NO:122, SEQ ID NO:129, or SEQ ID NO:136. In certain embodiments, the arenavirus GP1 as described herein comprises an amino acid sequence that is 90% identical to the amino acid sequence of SEQ ID NO:31, SEQ ID NO:32, SEQ ID NO:33, SEQ ID NO:142, SEQ ID NO:34, SEQ ID NO:35, SEQ ID NO:36, SEQ ID NO:54, SEQ ID NO:61, SEQ ID NO:68, SEQ ID NO:75, SEQ ID NO:86, SEQ ID NO:93, SEQ ID NO:100, SEQ ID NO: 115, SEQ ID NO:122, SEQ ID NO:129, or SEQ ID NO:136. In certain embodiments, the arenavirus GP1 as described herein comprises an amino acid sequence that is 95% identical to the amino acid sequence of SEQ ID NO:31, SEQ ID NO:32, SEQ ID NO:33, SEQ ID NO:142, SEQ ID NO:34, SEQ ID NO:35, SEQ ID NO:36, SEQ ID NO:54, SEQ ID NO:61, SEQ ID NO:68, SEQ ID NO:75, SEQ ID NO:86, SEQ ID NO:93, SEQ ID NO:100, SEQ ID NO: 115, SEQ ID NO:122, SEQ ID NO:129, or SEQ ID NO:136. In certain embodiments, the arenavirus GP1 as described herein comprises an amino acid sequence that is 96% identical to the amino acid sequence of SEQ ID NO:31, SEQ ID NO:32, SEQ ID NO:33, SEQ ID NO:142, SEQ ID NO:34, SEQ ID NO:35, SEQ ID NO:36, SEQ ID NO:54, SEQ ID NO:61, SEQ ID NO:68, SEQ ID NO:75, SEQ ID NO:86, SEQ ID NO:93, SEQ ID NO:100, SEQ ID NO: 115, SEQ ID NO:122, SEQ ID NO:129, or SEQ ID NO:136. In certain embodiments, the arenavirus GP1 as described herein comprises an amino acid sequence that is 97% identical to the amino acid sequence of SEQ ID NO:31, SEQ ID NO:32, SEQ ID NO:33, SEQ ID NO:142, SEQ ID NO:34, SEQ ID NO:35, SEQ ID NO:36, SEQ ID NO:54, SEQ ID NO:61, SEQ ID NO:68, SEQ ID NO:75, SEQ ID NO:86, SEQ ID NO:93, SEQ ID NO:100, SEQ ID NO:115, SEQ ID NO:122, SEQ ID NO:129, or SEQ ID NO:136. In certain embodiments, the arenavirus GP1 as described herein comprises an amino acid sequence that is 98% identical to the amino acid sequence of SEQ ID NO:31, SEQ ID NO:32, SEQ ID NO:33, SEQ ID NO:142, SEQ ID NO:34, SEQ ID NO:35, SEQ ID NO:36, SEQ ID NO:54, SEQ ID NO:61, SEQ ID NO:68, SEQ ID NO:75, SEQ ID NO:86, SEQ ID NO:93, SEQ ID NO:100, SEQ ID NO: 115, SEQ ID NO:122, SEQ ID NO:129, or SEQ ID NO:136. In certain embodiments, the arenavirus GP1 as described herein comprises an amino acid sequence that is 99% identical to the amino acid sequence of SEQ ID NO:31, SEQ ID NO:32, SEQ ID NO:33, SEQ ID NO:142, SEQ ID NO:34, SEQ ID NO:35, SEQ ID NO:36, SEQ ID NO:54, SEQ ID NO:61, SEQ ID NO:68, SEQ ID NO:75, SEQ ID NO:86, SEQ ID NO:93, SEQ ID NO:100, SEQ ID NO: 115, SEQ ID NO:122, SEQ ID NO:129, or SEQ ID NO:136.

[0225] In certain embodiments, the functional fragment is GP2. In certain embodiments, the GP2 as described herein comprises an amino acid sequence that is at least 80%, 85%, 90%, 95%, 96%, 97%, 98%, 99% or 100% identical to the amino acid sequence of SEQ ID NO:37, SEQ ID NO:38, SEQ ID NO:39, SEQ ID NO:40, SEQ ID NO:41, SEQ ID NO:42, SEQ ID NO:55, SEQ ID NO:62, SEQ ID NO:69, SEQ ID NO:76, SEQ ID NO:87, SEQ ID NO:94, SEQ ID NO:101, SEQ ID NO:116, SEQ ID NO:123, SEQ ID NO:130, or SEQ ID NO:137. In certain embodiments, the arenavirus GP2 as described herein comprises an amino acid sequence that is at least 80% identical to the amino acid sequence of SEQ ID NO:37, SEQ ID NO:38, SEQ ID NO:39, SEQ ID NO:40, SEQ ID NO:41, SEQ ID NO:42, SEQ ID NO:55, SEQ ID NO:62, SEQ ID NO:69, SEQ ID NO:76, SEQ ID NO:87, SEQ ID NO:94, SEQ ID NO:101, SEQ ID NO: 116, SEQ ID NO:123, SEQ ID NO:130, or SEQ ID NO:137. In certain embodiments, the arenavirus GP2 as described herein comprises an amino acid sequence that is at least 85% identical to the amino acid sequence of SEQ ID NO:37, SEQ ID NO:38, SEQ ID NO:39, SEQ ID NO:40, SEQ ID NO:41, SEQ ID NO:42, SEQ ID NO:55, SEQ ID NO:62, SEQ ID NO:69, SEQ ID NO:76, SEQ ID NO:87, SEQ ID NO:94, SEQ ID NO:101, SEQ ID NO: 116, SEQ ID NO:123, SEQ ID NO:130, or SEQ ID NO:137. In certain embodiments, the arenavirus GP2 as described herein comprises an amino acid sequence that is at least 90% identical to the amino acid sequence of SEQ ID NO:37, SEQ ID NO:38, SEQ ID NO:39, SEQ ID NO:40, SEQ ID NO:41, SEQ ID NO:42, SEQ ID NO:55, SEQ ID NO:62, SEQ ID NO:69, SEQ ID NO:76, SEQ ID NO:87, SEQ ID NO:94, SEQ ID NO:101, SEQ ID NO: 116, SEQ ID NO:123, SEQ ID NO:130, or SEQ ID NO:137. In certain embodiments, the arenavirus GP2 as described herein comprises an amino acid sequence that is at least 95% identical to the amino acid sequence of SEQ ID NO:37, SEQ ID NO:38, SEQ ID NO:39, SEQ ID NO:40, SEQ ID NO:41, SEQ ID NO:42, SEQ ID NO:55, SEQ ID NO:62, SEQ ID NO:69, SEQ ID NO:76, SEQ ID NO:87, SEQ ID NO:94, SEQ ID NO:101, SEQ ID NO: 116, SEQ ID NO:123, SEQ ID NO:130, or SEQ ID NO:137. In certain embodiments, the arenavirus GP2 as described herein comprises an amino acid sequence that is at least 96% identical to the amino acid sequence of SEQ ID NO:37, SEQ ID NO:38, SEQ ID NO:39, SEQ ID NO:40, SEQ ID NO:41, SEQ ID NO:42, SEQ ID NO:55, SEQ ID NO:62, SEQ ID NO:69, SEQ ID NO:76, SEQ ID NO:87, SEQ ID NO:94, SEQ ID NO:101, SEQ ID NO: 116, SEQ ID NO:123, SEQ ID NO:130, or SEQ ID NO:137. In certain embodiments, the arenavirus GP2 as described herein comprises an amino acid sequence that is at least 97% identical to the amino acid sequence of SEQ ID NO:37, SEQ ID NO:38, SEQ ID NO:39, SEQ ID NO:40, SEQ ID NO:41, SEQ ID NO:42, SEQ ID NO:55, SEQ ID NO:62, SEQ ID NO:69, SEQ ID NO:76, SEQ ID NO:87, SEQ ID NO:94, SEQ ID NO:101, SEQ ID NO: 116, SEQ ID NO:123, SEQ ID NO:130, or SEQ ID NO:137. In certain embodiments, the arenavirus GP2 as described herein comprises an amino acid sequence that is at least 98% identical to the amino acid sequence of SEQ ID NO:37, SEQ ID NO:38, SEQ ID NO:39, SEQ ID NO:40, SEQ ID NO:41, SEQ ID NO:42, SEQ ID NO:55, SEQ ID NO:62, SEQ ID NO:69, SEQ ID NO:76, SEQ ID NO:87, SEQ ID NO:94, SEQ ID NO:101, SEQ ID NO: 116, SEQ ID NO:123, SEQ ID NO:130, or SEQ ID NO:137. In certain embodiments, the arenavirus GP2 as described herein comprises an amino acid sequence that is at least 99% identical to the amino acid sequence of SEQ ID NO:37, SEQ ID NO:38, SEQ ID NO:39, SEQ ID NO:40, SEQ ID NO:41, SEQ ID NO:42, SEQ ID NO:55, SEQ ID NO:62, SEQ ID NO:69, SEQ ID NO:76, SEQ ID NO:87, SEQ ID NO:94, SEQ ID NO:101, SEQ ID NO: 116, SEQ ID NO:123, SEQ ID NO:130, or SEQ ID NO:137. In certain embodiments, the arenavirus GP2 as described herein comprises an amino acid sequence that is 100% identical to the amino acid sequence of SEQ ID NO:37, SEQ ID NO:38, SEQ ID NO:39, SEQ ID NO:40, SEQ ID NO:41, SEQ ID NO:42, SEQ ID NO:55, SEQ ID NO:62, SEQ ID NO:69, SEQ ID NO:76, SEQ ID NO:87, SEQ ID NO:94, SEQ ID NO:101, SEQ ID NO: 116, SEQ ID NO:123, SEQ ID NO:130, or SEQ ID NO:137. In certain embodiments, the arenavirus GP2 as described herein comprises an amino acid sequence that is 80% identical to the amino acid sequence of SEQ ID NO:37, SEQ ID NO:38, SEQ ID NO:39, SEQ ID NO:40, SEQ ID NO:41, SEQ ID NO:42, SEQ ID NO:55, SEQ ID NO:62, SEQ ID NO:69, SEQ ID NO:76, SEQ ID NO:87, SEQ ID NO:94, SEQ ID NO:101, SEQ ID NO: 116, SEQ ID NO:123, SEQ ID NO:130, or SEQ ID NO:137. In certain embodiments, the arenavirus GP2 as described herein comprises an amino acid sequence that is 85% identical to the amino acid sequence of SEQ ID NO:37, SEQ ID NO:38, SEQ ID NO:39, SEQ ID NO:40, SEQ ID NO:41, SEQ ID NO:42, SEQ ID NO:55, SEQ ID NO:62, SEQ ID NO:69, SEQ ID NO:76, SEQ ID NO:87, SEQ ID NO:94, SEQ ID NO:101, SEQ ID NO:116, SEQ ID NO:123, SEQ ID NO:130, or SEQ ID NO:137. In certain embodiments, the arenavirus GP2 as described herein comprises an amino acid sequence that is 90% identical to the amino acid sequence of SEQ ID NO:37, SEQ ID NO:38, SEQ ID NO:39, SEQ ID NO:40, SEQ ID NO:41, SEQ ID NO:42, SEQ ID NO:55, SEQ ID NO:62, SEQ ID NO:69, SEQ ID NO:76, SEQ ID NO:87, SEQ ID NO:94, SEQ ID NO:101, SEQ ID NO:116, SEQ ID NO:123, SEQ ID NO:130, or SEQ ID NO:137. In certain embodiments, the arenavirus GP2 as described herein comprises an amino acid sequence that is 95% identical to the amino acid sequence of SEQ ID NO:37, SEQ ID NO:38, SEQ ID NO:39, SEQ ID NO:40, SEQ ID NO:41, SEQ ID NO:42, SEQ ID NO:55, SEQ ID NO:62, SEQ ID NO:69, SEQ ID NO:76, SEQ ID NO:87, SEQ ID NO:94, SEQ ID NO:101, SEQ ID NO:116, SEQ ID NO:123, SEQ ID NO:130, or SEQ ID NO:137. In certain embodiments, the arenavirus GP2 as described herein comprises an amino acid sequence that is 96% identical to the amino acid sequence of SEQ ID NO:37, SEQ ID NO:38, SEQ ID NO:39, SEQ ID NO:40, SEQ ID NO:41, SEQ ID NO:42, SEQ ID NO:55, SEQ ID NO:62, SEQ ID NO:69, SEQ ID NO:76, SEQ ID NO:87, SEQ ID NO:94, SEQ ID NO:101, SEQ ID NO:116, SEQ ID NO:123, SEQ ID NO:130, or SEQ ID NO:137. In certain embodiments, the arenavirus GP2 as described herein comprises an amino acid sequence that is 97% identical to the amino acid sequence of SEQ ID NO:37, SEQ ID NO:38, SEQ ID NO:39, SEQ ID NO:40, SEQ ID NO:41, SEQ ID NO:42, SEQ ID NO:55, SEQ ID NO:62, SEQ ID NO:69, SEQ ID NO:76, SEQ ID NO:87, SEQ ID NO:94, SEQ ID NO:101, SEQ ID NO: 116, SEQ ID NO:123, SEQ ID NO:130, or SEQ ID NO:137. In certain embodiments, the arenavirus GP2 as described herein comprises an amino acid sequence that is 98% identical to the amino acid sequence of SEQ ID NO:37, SEQ ID NO:38, SEQ ID NO:39, SEQ ID NO:40, SEQ ID NO:41, SEQ ID NO:42, SEQ ID NO:55, SEQ ID NO:62, SEQ ID NO:69, SEQ ID NO:76, SEQ ID NO:87, SEQ ID NO:94, SEQ ID NO:101, SEQ ID NO:116, SEQ ID NO:123, SEQ ID NO:130, or SEQ ID NO:137. In certain embodiments, the arenavirus GP2 as described herein comprises an amino acid sequence that is 99% identical to the amino acid sequence of SEQ ID NO:37, SEQ ID NO:38, SEQ ID NO:39, SEQ ID NO:40, SEQ ID NO:41, SEQ ID NO:42, SEQ ID NO:55, SEQ ID NO:62, SEQ ID NO:69, SEQ ID NO:76, SEQ ID NO:87, SEQ ID NO:94, SEQ ID NO:101, SEQ ID NO:116, SEQ ID NO:123, SEQ ID NO:130, or SEQ ID NO:137.

[0226] In certain embodiments, the functional fragment may consist of more than one of a GP signal peptide, GP1 and GP2. In certain embodiments, the functional fragment may consist of GP signal peptide and GP1. In certain embodiments, the functional fragment may consist of GP signal peptide and GP2. In certain embodiments, the functional fragment may consist of GP1 and GP2. In certain embodiments, the functional fragment is not the full-length glycoprotein precursor.

[0227] In certain embodiments, the functional fragment is a fragment of an arenavirus GP signal peptide. In certain embodiments, the arenavirus GP signal peptide is wild-type. In other embodiments, the arenavirus GP signal peptide is recombinant. In certain embodiments, the arenavirus GP signal peptide is selected from the group consisting of GP signal peptide of LCMV, Lassa virus, Pichinde virus, Oliveros virus, Tamiami virus, Mobala virus, Mopeia virus, Ippy virus, Amapari virus, Flexal virus, Guanarito virus, Latino virus, Machupo virus, Parana virus, Pirital virus, Sabia virus, Tacaribe virus, Bear Canyon virus, Whitewater Arroyo virus, Allpahuayo virus (ALLV), Alxa virus, Chapare virus, Lijiang virus, Cupixi virus, Gairo virus, Loei River virus, Lujo virus, Luna virus, Luli virus, Lunk virus, Mariental virus, Merino Walk virus, Morogoro virus, Okahandja virus, Aporé virus, Ryukyu virus, Solwezi virus, souris virus, Wenzhou virus, Big Brushy Tank virus, Catarina virus, Skinner Tank virus, Tonto Creek virus, Xapuri virus, or Junin virus. In certain embodiments, the functional fragment is selected from the group consisting of the n region, hydrophobic region 1 (h-1 region) and hydrophobic region 2 (h-2 region) of the arenavirus GP signal peptide. In certain embodiments, the functional fragment is the n region of the arenavirus GP signal peptide. In certain embodiments, the functional fragment is the h-1 region of the arenavirus GP signal peptide. In certain embodiments, the functional fragment is the h-2 region of the arenavirus GP signal peptide.

[0228] In certain embodiments, the functional fragment as described herein is a fragment of a polypeptide that comprises an amino acid sequence that is at least 80% identical to the amino acid sequence of SEQ ID NO:1, SEQ ID NO:2, SEQ ID NO:3, SEQ ID NO:4, SEQ ID NO:5, SEQ ID NO:6, SEQ ID NO:7, SEQ ID NO:8, SEQ ID NO:9, SEQ ID NO:10, SEQ ID NO: 11, SEQ ID NO:12, SEQ ID NO:13, SEQ ID NO:14, SEQ ID NO:15, SEQ ID NO:16, SEQ ID NO:17, SEQ ID NO:18, SEQ ID NO:19, SEQ ID NO:20, SEQ ID NO:21, SEQ ID NO:22, SEQ ID NO:23, SEQ ID NO:24, SEQ ID NO:48, SEQ ID NO:52, SEQ ID NO:59, SEQ ID NO:66, SEQ ID NO:73, SEQ ID NO:80, SEQ ID NO:84, SEQ ID NO:91, SEQ ID NO:98, SEQ ID NO:105, SEQ ID NO:109, SEQ ID NO:113, SEQ ID NO:120, SEQ ID NO:127, SEQ ID NO:134, SEQ ID NO:49, SEQ ID NO:56, SEQ ID NO:63, SEQ ID NO:70, SEQ ID NO:77, SEQ ID NO:81, SEQ ID NO:88, SEQ ID NO:95, SEQ ID NO:102, SEQ ID NO:106, SEQ ID NO:110, SEQ ID NO:117, SEQ ID NO:124, SEQ ID NO:131, SEQ ID NO:138, SEQ ID NO:50, SEQ ID NO:57, SEQ ID NO:64, SEQ ID NO:71, SEQ ID NO:78, SEQ ID NO:82, SEQ ID NO:89, SEQ ID NO:96, SEQ ID NO:103, SEQ ID NO:107, SEQ ID NO:111, SEQ ID NO: 118, SEQ ID NO:125, SEQ ID NO:132, SEQ ID NO:139, SEQ ID NO:51, SEQ ID NO:58, SEQ ID NO:65, SEQ ID NO:72, SEQ ID NO:79, SEQ ID NO:83, SEQ ID NO:90, SEQ ID NO:97, SEQ ID NO:104, SEQ ID NO:108, SEQ ID NO:112, SEQ ID NO:119, SEQ ID NO:126, SEQ ID NO:133, or SEQ ID NO:140. In certain embodiments, the functional fragment as described herein is a fragment of a polypeptide that comprises an amino acid sequence that is at least 85% identical to the amino acid sequence of SEQ ID NO:1, SEQ ID NO:2, SEQ ID NO:3, SEQ ID NO:4, SEQ ID NO:5, SEQ ID NO:6, SEQ ID NO:7, SEQ ID NO:8, SEQ ID NO:9, SEQ ID NO:10, SEQ ID NO:11, SEQ ID NO:12, SEQ ID NO:13, SEQ ID NO:14, SEQ ID NO:15, SEQ ID NO:16, SEQ ID NO:17, SEQ ID NO:18, SEQ ID NO:19, SEQ ID NO:20, SEQ ID NO:21, SEQ ID NO:22, SEQ ID NO:23, SEQ ID NO:24, SEQ ID NO:48, SEQ ID NO:52, SEQ ID NO:59, SEQ ID NO:66, SEQ ID NO:73, SEQ ID NO:80, SEQ ID NO:84, SEQ ID NO:91, SEQ ID NO:98, SEQ ID NO:105, SEQ ID NO:109, SEQ ID NO: 113, SEQ ID NO:120, SEQ ID NO:127, SEQ ID NO:134, SEQ ID NO:49, SEQ ID NO:56, SEQ ID NO:63, SEQ ID NO:70, SEQ ID NO:77, SEQ ID NO:81, SEQ ID NO:88, SEQ ID NO:95, SEQ ID NO:102, SEQ ID NO:106, SEQ ID NO:110, SEQ ID NO: 117, SEQ ID NO:124, SEQ ID NO:131, SEQ ID NO:138, SEQ ID NO:50, SEQ ID NO:57, SEQ ID NO:64, SEQ ID NO:71, SEQ ID NO:78, SEQ ID NO:82, SEQ ID NO:89, SEQ ID NO:96, SEQ ID NO:103, SEQ ID NO:107, SEQ ID NO:111, SEQ ID NO: 118, SEQ ID NO:125, SEQ ID NO:132, SEQ ID NO:139, SEQ ID NO:51, SEQ ID NO:58, SEQ ID NO:65, SEQ ID NO:72, SEQ ID NO:79, SEQ ID NO:83, SEQ ID NO:90, SEQ ID NO:97, SEQ ID NO:104, SEQ ID NO:108, SEQ ID NO: 112, SEQ ID NO: 119, SEQ ID NO:126, SEQ ID NO:133, or SEQ ID NO:140. In certain embodiments, the functional fragment as described herein is a fragment of a polypeptide that comprises an amino acid sequence that is at least 90% identical to the amino acid sequence of SEQ ID NO:1, SEQ ID NO:2, SEQ ID NO:3, SEQ ID NO:4, SEQ ID NO:5, SEQ ID NO:6, SEQ ID NO:7, SEQ ID NO:8, SEQ ID NO:9, SEQ ID NO:10, SEQ ID NO: 11, SEQ ID NO:12, SEQ ID NO:13, SEQ ID NO:14, SEQ ID NO:15, SEQ ID NO:16, SEQ ID NO:17, SEQ ID NO:18, SEQ ID NO:19, SEQ ID NO:20, SEQ ID NO:21, SEQ ID NO:22, SEQ ID NO:23, SEQ ID NO:24, SEQ ID NO:48, SEQ ID NO:52, SEQ ID NO:59, SEQ ID NO:66, SEQ ID NO:73, SEQ ID NO:80, SEQ ID NO:84, SEQ ID NO:91, SEQ ID NO:98, SEQ ID NO:105, SEQ ID NO:109, SEQ ID NO:113, SEQ ID NO:120, SEQ ID NO:127, SEQ ID NO:134, SEQ ID NO:49, SEQ ID NO:56, SEQ ID NO:63, SEQ ID NO:70, SEQ ID NO:77, SEQ ID NO:81, SEQ ID NO:88, SEQ ID NO:95, SEQ ID NO:102, SEQ ID NO:106, SEQ ID NO:110, SEQ ID NO: 117, SEQ ID NO:124, SEQ ID NO:131, SEQ ID NO:138, SEQ ID NO:50, SEQ ID NO:57, SEQ ID NO:64, SEQ ID NO:71, SEQ ID NO:78, SEQ ID NO:82, SEQ ID NO:89, SEQ ID NO:96, SEQ ID NO:103, SEQ ID NO:107, SEQ ID NO:111, SEQ ID NO: 118, SEQ ID NO:125, SEQ ID NO:132, SEQ ID NO:139, SEQ ID NO:51, SEQ ID NO:58, SEQ ID NO:65, SEQ ID NO:72, SEQ ID NO:79, SEQ ID NO:83, SEQ ID NO:90, SEQ ID NO:97, SEQ ID NO:104, SEQ ID NO:108, SEQ ID NO: 112, SEQ ID NO: 119, SEQ ID NO:126, SEQ ID NO:133, or SEQ ID NO:140. In certain embodiments, the functional fragment as described herein is a fragment of a polypeptide that comprises an amino acid sequence that is at least 95% identical to the amino acid sequence of SEQ ID NO:1, SEQ ID NO:2, SEQ ID NO:3, SEQ ID NO:4, SEQ ID NO:5, SEQ ID NO:6, SEQ ID NO:7, SEQ ID NO:8, SEQ ID NO:9, SEQ ID NO:10, SEQ ID NO: 11, SEQ ID NO:12, SEQ ID NO:13, SEQ ID NO:14, SEQ ID NO:15, SEQ ID NO:16, SEQ ID NO:17, SEQ ID NO:18, SEQ ID NO:19, SEQ ID NO:20, SEQ ID NO:21, SEQ ID NO:22, SEQ ID NO:23, SEQ ID NO:24, SEQ ID NO:48, SEQ ID NO:52, SEQ ID NO:59, SEQ ID NO:66, SEQ ID NO:73, SEQ ID NO:80, SEQ ID NO:84, SEQ ID NO:91, SEQ ID NO:98, SEQ ID NO:105, SEQ ID NO:109, SEQ ID NO:113, SEQ ID NO:120, SEQ ID NO:127, SEQ ID NO:134, SEQ ID NO:49, SEQ ID NO:56, SEQ ID NO:63, SEQ ID NO:70, SEQ ID NO:77, SEQ ID NO:81, SEQ ID NO:88, SEQ ID NO:95, SEQ ID NO:102, SEQ ID NO:106, SEQ ID NO:110, SEQ ID NO: 117, SEQ ID NO:124, SEQ ID NO:131, SEQ ID NO:138, SEQ ID NO:50, SEQ ID NO:57, SEQ ID NO:64, SEQ ID NO:71, SEQ ID NO:78, SEQ ID NO:82, SEQ ID NO:89, SEQ ID NO:96, SEQ ID NO:103, SEQ ID NO:107, SEQ ID NO:111, SEQ ID NO: 118, SEQ ID NO:125, SEQ ID NO:132, SEQ ID NO:139, SEQ ID NO:51, SEQ ID NO:58, SEQ ID NO:65, SEQ ID NO:72, SEQ ID NO:79, SEQ ID NO:83, SEQ ID NO:90, SEQ ID NO:97, SEQ ID NO:104, SEQ ID NO:108, SEQ ID NO: 112, SEQ ID NO: 119, SEQ ID NO:126, SEQ ID NO:133, or SEQ ID NO:140. In certain embodiments, the functional fragment as described herein is a fragment of a polypeptide that comprises an amino acid sequence that is at least 96% identical to the amino acid sequence of SEQ ID NO:1, SEQ ID NO:2, SEQ ID NO:3, SEQ ID NO:4, SEQ ID NO:5, SEQ ID NO:6, SEQ ID NO:7, SEQ ID NO:8, SEQ ID NO:9, SEQ ID NO:10, SEQ ID NO: 11, SEQ ID NO:12, SEQ ID NO:13, SEQ ID NO:14, SEQ ID NO:15, SEQ ID NO:16, SEQ ID NO:17, SEQ ID NO:18, SEQ ID NO:19, SEQ ID NO:20, SEQ ID NO:21, SEQ ID NO:22, SEQ ID NO:23, SEQ ID NO:24, SEQ ID NO:48, SEQ ID NO:52, SEQ ID NO:59, SEQ ID NO:66, SEQ ID NO:73, SEQ ID NO:80, SEQ ID NO:84, SEQ ID NO:91, SEQ ID NO:98, SEQ ID NO:105, SEQ ID NO:109, SEQ ID NO:113, SEQ ID NO:120, SEQ ID NO:127, SEQ ID NO:134, SEQ ID NO:49, SEQ ID NO:56, SEQ ID NO:63, SEQ ID NO:70, SEQ ID NO:77, SEQ ID NO:81, SEQ ID NO:88, SEQ ID NO:95, SEQ ID NO:102, SEQ ID NO:106, SEQ ID NO:110, SEQ ID NO:117, SEQ ID NO:124, SEQ ID NO:131, SEQ ID NO:138, SEQ ID NO:50, SEQ ID NO:57, SEQ ID NO:64, SEQ ID NO:71, SEQ ID NO:78, SEQ ID NO:82, SEQ ID NO:89, SEQ ID NO:96, SEQ ID NO:103, SEQ ID NO:107, SEQ ID NO:111, SEQ ID NO: 118, SEQ ID NO:125, SEQ ID NO:132, SEQ ID NO:139, SEQ ID NO:51, SEQ ID NO:58, SEQ ID NO:65, SEQ ID NO:72, SEQ ID NO:79, SEQ ID NO:83, SEQ ID NO:90, SEQ ID NO:97, SEQ ID NO:104, SEQ ID NO:108, SEQ ID NO:112, SEQ ID NO:119, SEQ ID NO:126, SEQ ID NO:133, or SEQ ID NO:140. In certain embodiments, the functional fragment as described herein is a fragment of a polypeptide that comprises an amino acid sequence that is at least 97% identical to the amino acid sequence of SEQ ID NO:1, SEQ ID NO:2, SEQ ID NO:3, SEQ ID NO:4, SEQ ID NO:5, SEQ ID NO:6, SEQ ID NO:7, SEQ ID NO:8, SEQ ID NO:9, SEQ ID NO:10, SEQ ID NO:11, SEQ ID NO:12, SEQ ID NO:13, SEQ ID NO:14, SEQ ID NO:15, SEQ ID NO:16, SEQ ID NO:17, SEQ ID NO:18, SEQ ID NO:19, SEQ ID NO:20, SEQ ID NO:21, SEQ ID NO:22, SEQ ID NO:23, SEQ ID NO:24, SEQ ID NO:48, SEQ ID NO:52, SEQ ID NO:59, SEQ ID NO:66, SEQ ID NO:73, SEQ ID NO:80, SEQ ID NO:84, SEQ ID NO:91, SEQ ID NO:98, SEQ ID NO:105, SEQ ID NO:109, SEQ ID NO: 113, SEQ ID NO:120, SEQ ID NO:127, SEQ ID NO:134, SEQ ID NO:49, SEQ ID NO:56, SEQ ID NO:63, SEQ ID NO:70, SEQ ID NO:77, SEQ ID NO:81, SEQ ID NO:88, SEQ ID NO:95, SEQ ID NO:102, SEQ ID NO:106, SEQ ID NO:110, SEQ ID NO: 117, SEQ ID NO:124, SEQ ID NO:131, SEQ ID NO:138, SEQ ID NO:50, SEQ ID NO:57, SEQ ID NO:64, SEQ ID NO:71, SEQ ID NO:78, SEQ ID NO:82, SEQ ID NO:89, SEQ ID NO:96, SEQ ID NO:103, SEQ ID NO:107, SEQ ID NO:111, SEQ ID NO: 118, SEQ ID NO:125, SEQ ID NO:132, SEQ ID NO:139, SEQ ID NO:51, SEQ ID NO:58, SEQ ID NO:65, SEQ ID NO:72, SEQ ID NO:79, SEQ ID NO:83, SEQ ID NO:90, SEQ ID NO:97, SEQ ID NO:104, SEQ ID NO:108, SEQ ID NO: 112, SEQ ID NO: 119, SEQ ID NO:126, SEQ ID NO:133, or SEQ ID NO:140. In certain embodiments, the functional fragment as described herein is a fragment of a polypeptide that comprises an amino acid sequence that is at least 98% identical to the amino acid sequence of SEQ ID NO:1, SEQ ID NO:2, SEQ ID NO:3, SEQ ID NO:4, SEQ ID NO:5, SEQ ID NO:6, SEQ ID NO:7, SEQ ID NO:8, SEQ ID NO:9, SEQ ID NO:10, SEQ ID NO: 11, SEQ ID NO:12, SEQ ID NO:13, SEQ ID NO:14, SEQ ID NO:15, SEQ ID NO:16, SEQ ID NO:17, SEQ ID NO:18, SEQ ID NO:19, SEQ ID NO:20, SEQ ID NO:21, SEQ ID NO:22, SEQ ID NO:23, SEQ ID NO:24, SEQ ID NO:48, SEQ ID NO:52, SEQ ID NO:59, SEQ ID NO:66, SEQ ID NO:73, SEQ ID NO:80, SEQ ID NO:84, SEQ ID NO:91, SEQ ID NO:98, SEQ ID NO:105, SEQ ID NO:109, SEQ ID NO:113, SEQ ID NO:120, SEQ ID NO:127, SEQ ID NO:134, SEQ ID NO:49, SEQ ID NO:56, SEQ ID NO:63, SEQ ID NO:70, SEQ ID NO:77, SEQ ID NO:81, SEQ ID NO:88, SEQ ID NO:95, SEQ ID NO:102, SEQ ID NO:106, SEQ ID NO:110, SEQ ID NO: 117, SEQ ID NO:124, SEQ ID NO:131, SEQ ID NO:138, SEQ ID NO:50, SEQ ID NO:57, SEQ ID NO:64, SEQ ID NO:71, SEQ ID NO:78, SEQ ID NO:82, SEQ ID NO:89, SEQ ID NO:96, SEQ ID NO:103, SEQ ID NO:107, SEQ ID NO:111, SEQ ID NO: 118, SEQ ID NO:125, SEQ ID NO:132, SEQ ID NO:139, SEQ ID NO:51, SEQ ID NO:58, SEQ ID NO:65, SEQ ID NO:72, SEQ ID NO:79, SEQ ID NO:83, SEQ ID NO:90, SEQ ID NO:97, SEQ ID NO:104, SEQ ID NO:108, SEQ ID NO: 112, SEQ ID NO: 119, SEQ ID NO:126, SEQ ID NO:133, or SEQ ID NO:140. In certain embodiments, the functional fragment as described herein is a fragment of a polypeptide that comprises an amino acid sequence that is at least 99% identical to the amino acid sequence of SEQ ID NO:1, SEQ ID NO:2, SEQ ID NO:3, SEQ ID NO:4, SEQ ID NO:5, SEQ ID NO:6, SEQ ID NO:7, SEQ ID NO:8, SEQ ID NO:9, SEQ ID NO:10, SEQ ID NO: 11, SEQ ID NO:12, SEQ ID NO:13, SEQ ID NO:14, SEQ ID NO:15, SEQ ID NO:16, SEQ ID NO:17, SEQ ID NO:18, SEQ ID NO:19, SEQ ID NO:20, SEQ ID NO:21, SEQ ID NO:22, SEQ ID NO:23, SEQ ID NO:24, SEQ ID NO:48, SEQ ID NO:52, SEQ ID NO:59, SEQ ID NO:66, SEQ ID NO:73, SEQ ID NO:80, SEQ ID NO:84, SEQ ID NO:91, SEQ ID NO:98, SEQ ID NO:105, SEQ ID NO:109, SEQ ID NO:113, SEQ ID NO:120, SEQ ID NO:127, SEQ ID NO:134, SEQ ID NO:49, SEQ ID NO:56, SEQ ID NO:63, SEQ ID NO:70, SEQ ID NO:77, SEQ ID NO:81, SEQ ID NO:88, SEQ ID NO:95, SEQ ID NO:102, SEQ ID NO:106, SEQ ID NO:110, SEQ ID NO: 117, SEQ ID NO:124, SEQ ID NO:131, SEQ ID NO:138, SEQ ID NO:50, SEQ ID NO:57, SEQ ID NO:64, SEQ ID NO:71, SEQ ID NO:78, SEQ ID NO:82, SEQ ID NO:89, SEQ ID NO:96, SEQ ID NO:103, SEQ ID NO:107, SEQ ID NO:111, SEQ ID NO: 118, SEQ ID NO:125, SEQ ID NO:132, SEQ ID NO:139, SEQ ID NO:51, SEQ ID NO:58, SEQ ID NO:65, SEQ ID NO:72, SEQ ID NO:79, SEQ ID NO:83, SEQ ID NO:90, SEQ ID NO:97, SEQ ID NO:104, SEQ ID NO:108, SEQ ID NO: 112, SEQ ID NO: 119, SEQ ID NO:126, SEQ ID NO:133, or SEQ ID NO:140. In certain embodiments, the functional fragment as described herein is a fragment of a polypeptide that comprises an amino acid sequence that is 100% identical to the amino acid sequence of SEQ ID NO:1, SEQ ID NO:2, SEQ ID NO:3, SEQ ID NO:4, SEQ ID NO:5, SEQ ID NO:6, SEQ ID NO:7, SEQ ID NO:8, SEQ ID NO:9, SEQ ID NO:10, SEQ ID NO: 11, SEQ ID NO:12, SEQ ID NO:13, SEQ ID NO:14, SEQ ID NO:15, SEQ ID NO:16, SEQ ID NO:17, SEQ ID NO:18, SEQ ID NO:19, SEQ ID NO:20, SEQ ID NO:21, SEQ ID NO:22, SEQ ID NO:23, SEQ ID NO:24, SEQ ID NO:48, SEQ ID NO:52, SEQ ID NO:59, SEQ ID NO:66, SEQ ID NO:73, SEQ ID NO:80, SEQ ID NO:84, SEQ ID NO:91, SEQ ID NO:98, SEQ ID NO:105, SEQ ID NO:109, SEQ ID NO:113, SEQ ID NO:120, SEQ ID NO:127, SEQ ID NO:134, SEQ ID NO:49, SEQ ID NO:56, SEQ ID NO:63, SEQ ID NO:70, SEQ ID NO:77, SEQ ID NO:81, SEQ ID NO:88, SEQ ID NO:95, SEQ ID NO:102, SEQ ID NO:106, SEQ ID NO:110, SEQ ID NO:117, SEQ ID NO:124, SEQ ID NO:131, SEQ ID NO:138, SEQ ID NO:50, SEQ ID NO:57, SEQ ID NO:64, SEQ ID NO:71, SEQ ID NO:78, SEQ ID NO:82, SEQ ID NO:89, SEQ ID NO:96, SEQ ID NO:103, SEQ ID NO:107, SEQ ID NO:111, SEQ ID NO: 118, SEQ ID NO:125, SEQ ID NO:132, SEQ ID NO:139, SEQ ID NO:51, SEQ ID NO:58, SEQ ID NO:65, SEQ ID NO:72, SEQ ID NO:79, SEQ ID NO:83, SEQ ID NO:90, SEQ ID NO:97, SEQ ID NO:104, SEQ ID NO:108, SEQ ID NO:112, SEQ ID NO:119, SEQ ID NO:126, SEQ ID NO:133, or SEQ ID NO:140. In certain embodiments, the functional fragment as described herein is a fragment of a polypeptide that comprises an amino acid sequence that is 80% identical to the amino acid sequence of SEQ ID NO:1, SEQ ID NO:2, SEQ ID NO:3, SEQ ID NO:4, SEQ ID NO:5, SEQ ID NO:6, SEQ ID NO:7, SEQ ID NO:8, SEQ ID NO:9, SEQ ID NO:10, SEQ ID NO: 11, SEQ ID NO:12, SEQ ID NO:13, SEQ ID NO:14, SEQ ID NO:15, SEQ ID NO:16, SEQ ID NO:17, SEQ ID NO:18, SEQ ID NO:19, SEQ ID NO:20, SEQ ID NO:21, SEQ ID NO:22, SEQ ID NO:23, SEQ ID NO:24, SEQ ID NO:48, SEQ ID NO:52, SEQ ID NO:59, SEQ ID NO:66, SEQ ID NO:73, SEQ ID NO:80, SEQ ID NO:84, SEQ ID NO:91, SEQ ID NO:98, SEQ ID NO:105, SEQ ID NO:109, SEQ ID NO:113, SEQ ID NO:120, SEQ ID NO:127, SEQ ID NO:134, SEQ ID NO:49, SEQ ID NO:56, SEQ ID NO:63, SEQ ID NO:70, SEQ ID NO:77, SEQ ID NO:81, SEQ ID NO:88, SEQ ID NO:95, SEQ ID NO:102, SEQ ID NO:106, SEQ ID NO:110, SEQ ID NO: 117, SEQ ID NO:124, SEQ ID NO:131, SEQ ID NO:138, SEQ ID NO:50, SEQ ID NO:57, SEQ ID NO:64, SEQ ID NO:71, SEQ ID NO:78, SEQ ID NO:82, SEQ ID NO:89, SEQ ID NO:96, SEQ ID NO:103, SEQ ID NO:107, SEQ ID NO:111, SEQ ID NO: 118, SEQ ID NO:125, SEQ ID NO:132, SEQ ID NO:139, SEQ ID NO:51, SEQ ID NO:58, SEQ ID NO:65, SEQ ID NO:72, SEQ ID NO:79, SEQ ID NO:83, SEQ ID NO:90, SEQ ID NO:97, SEQ ID NO:104, SEQ ID NO:108, SEQ ID NO: 112, SEQ ID NO: 119, SEQ ID NO:126, SEQ ID NO:133, or SEQ ID NO:140. In certain embodiments, the functional fragment as described herein is a fragment of a polypeptide that comprises an amino acid sequence that is 85% identical to the amino acid sequence of SEQ ID NO:1, SEQ ID NO:2, SEQ ID NO:3, SEQ ID NO:4, SEQ ID NO:5, SEQ ID NO:6, SEQ ID NO:7, SEQ ID NO:8, SEQ ID NO:9, SEQ ID NO:10, SEQ ID NO: 11, SEQ ID NO:12, SEQ ID NO:13, SEQ ID NO:14, SEQ ID NO:15, SEQ ID NO:16, SEQ ID NO:17, SEQ ID NO:18, SEQ ID NO:19, SEQ ID NO:20, SEQ ID NO:21, SEQ ID NO:22, SEQ ID NO:23, SEQ ID NO:24, SEQ ID NO:48, SEQ ID NO:52, SEQ ID NO:59, SEQ ID NO:66, SEQ ID NO:73, SEQ ID NO:80, SEQ ID NO:84, SEQ ID NO:91, SEQ ID NO:98, SEQ ID NO:105, SEQ ID NO:109, SEQ ID NO:113, SEQ ID NO:120, SEQ ID NO:127, SEQ ID NO:134, SEQ ID NO:49, SEQ ID NO:56, SEQ ID NO:63, SEQ ID NO:70, SEQ ID NO:77, SEQ ID NO:81, SEQ ID NO:88, SEQ ID NO:95, SEQ ID NO:102, SEQ ID NO:106, SEQ ID NO:110, SEQ ID NO:117, SEQ ID NO:124, SEQ ID NO:131, SEQ ID NO:138, SEQ ID NO:50, SEQ ID NO:57, SEQ ID NO:64, SEQ ID NO:71, SEQ ID NO:78, SEQ ID NO:82, SEQ ID NO:89, SEQ ID NO:96, SEQ ID NO:103, SEQ ID NO:107, SEQ ID NO:111, SEQ ID NO: 118, SEQ ID NO:125, SEQ ID NO:132, SEQ ID NO:139, SEQ ID NO:51, SEQ ID NO:58, SEQ ID NO:65, SEQ ID NO:72, SEQ ID NO:79, SEQ ID NO:83, SEQ ID NO:90, SEQ ID NO:97, SEQ ID NO:104, SEQ ID NO:108, SEQ ID NO:112, SEQ ID NO:119, SEQ ID NO:126, SEQ ID NO:133, or SEQ ID NO:140. In certain embodiments, the functional fragment as described herein is a fragment of a polypeptide that comprises an amino acid sequence that is 90% identical to the amino acid sequence of SEQ ID NO:1, SEQ ID NO:2, SEQ ID NO:3, SEQ ID NO:4, SEQ ID NO:5, SEQ ID NO:6, SEQ ID NO:7, SEQ ID NO:8, SEQ ID NO:9, SEQ ID NO:10, SEQ ID NO: 11, SEQ ID NO:12, SEQ ID NO:13, SEQ ID NO:14, SEQ ID NO:15, SEQ ID NO:16, SEQ ID NO:17, SEQ ID NO:18, SEQ ID NO:19, SEQ ID NO:20, SEQ ID NO:21, SEQ ID NO:22, SEQ ID NO:23, SEQ ID NO:24, SEQ ID NO:48, SEQ ID NO:52, SEQ ID NO:59, SEQ ID NO:66, SEQ ID NO:73, SEQ ID NO:80, SEQ ID NO:84, SEQ ID NO:91, SEQ ID NO:98, SEQ ID NO:105, SEQ ID NO:109, SEQ ID NO:113, SEQ ID NO:120, SEQ ID NO:127, SEQ ID NO:134, SEQ ID NO:49, SEQ ID NO:56, SEQ ID NO:63, SEQ ID NO:70, SEQ ID NO:77, SEQ ID NO:81, SEQ ID NO:88, SEQ ID NO:95, SEQ ID NO:102, SEQ ID NO:106, SEQ ID NO:110, SEQ ID NO: 117, SEQ ID NO:124, SEQ ID NO:131, SEQ ID NO:138, SEQ ID NO:50, SEQ ID NO:57, SEQ ID NO:64, SEQ ID NO:71, SEQ ID NO:78, SEQ ID NO:82, SEQ ID NO:89, SEQ ID NO:96, SEQ ID NO:103, SEQ ID NO:107, SEQ ID NO:111, SEQ ID NO: 118, SEQ ID NO:125, SEQ ID NO:132, SEQ ID NO:139, SEQ ID NO:51, SEQ ID NO:58, SEQ ID NO:65, SEQ ID NO:72, SEQ ID NO:79, SEQ ID NO:83, SEQ ID NO:90, SEQ ID NO:97, SEQ ID NO:104, SEQ ID NO:108, SEQ ID NO: 112, SEQ ID NO: 119, SEQ ID NO:126, SEQ ID NO:133, or SEQ ID NO:140. In certain embodiments, the functional fragment as described herein is a fragment of a polypeptide that comprises an amino acid sequence that is 95% identical to the amino acid sequence of SEQ ID NO:1, SEQ ID NO:2, SEQ ID NO:3, SEQ ID NO:4, SEQ ID NO:5, SEQ ID NO:6, SEQ ID NO:7, SEQ ID NO:8, SEQ ID NO:9, SEQ ID NO:10, SEQ ID NO: 11, SEQ ID NO:12, SEQ ID NO:13, SEQ ID NO:14, SEQ ID NO:15, SEQ ID NO:16, SEQ ID NO:17, SEQ ID NO:18, SEQ ID NO:19, SEQ ID NO:20, SEQ ID NO:21, SEQ ID NO:22, SEQ ID NO:23, SEQ ID NO:24, SEQ ID NO:48, SEQ ID NO:52, SEQ ID NO:59, SEQ ID NO:66, SEQ ID NO:73, SEQ ID NO:80, SEQ ID NO:84, SEQ ID NO:91, SEQ ID NO:98, SEQ ID NO:105, SEQ ID NO:109, SEQ ID NO:113, SEQ ID NO:120, SEQ ID NO:127, SEQ ID NO:134, SEQ ID NO:49, SEQ ID NO:56, SEQ ID NO:63, SEQ ID NO:70, SEQ ID NO:77, SEQ ID NO:81, SEQ ID NO:88, SEQ ID NO:95, SEQ ID NO:102, SEQ ID NO:106, SEQ ID NO:110, SEQ ID NO:117, SEQ ID NO:124, SEQ ID NO:131, SEQ ID NO:138, SEQ ID NO:50, SEQ ID NO:57, SEQ ID NO:64, SEQ ID NO:71, SEQ ID NO:78, SEQ ID NO:82, SEQ ID NO:89, SEQ ID NO:96, SEQ ID NO:103, SEQ ID NO:107, SEQ ID NO:111, SEQ ID NO: 118, SEQ ID NO:125, SEQ ID NO:132, SEQ ID NO:139, SEQ ID NO:51, SEQ ID NO:58, SEQ ID NO:65, SEQ ID NO:72, SEQ ID NO:79, SEQ ID NO:83, SEQ ID NO:90, SEQ ID NO:97, SEQ ID NO:104, SEQ ID NO:108, SEQ ID NO:112, SEQ ID NO:119, SEQ ID NO:126, SEQ ID NO:133, or SEQ ID NO:140. In certain embodiments, the functional fragment as described herein is a fragment of a polypeptide that comprises an amino acid sequence that is 96% identical to the amino acid sequence of SEQ ID NO:1, SEQ ID NO:2, SEQ ID NO:3, SEQ ID NO:4, SEQ ID NO:5, SEQ ID NO:6, SEQ ID NO:7, SEQ ID NO:8, SEQ ID NO:9, SEQ ID NO:10, SEQ ID NO: 11, SEQ ID NO:12, SEQ ID NO:13, SEQ ID NO:14, SEQ ID NO:15, SEQ ID NO:16, SEQ ID NO:17, SEQ ID NO:18, SEQ ID NO:19, SEQ ID NO:20, SEQ ID NO:21, SEQ ID NO:22, SEQ ID NO:23, SEQ ID NO:24, SEQ ID NO:48, SEQ ID NO:52, SEQ ID NO:59, SEQ ID NO:66, SEQ ID NO:73, SEQ ID NO:80, SEQ ID NO:84, SEQ ID NO:91, SEQ ID NO:98, SEQ ID NO:105, SEQ ID NO:109, SEQ ID NO:113, SEQ ID NO:120, SEQ ID NO:127, SEQ ID NO:134, SEQ ID NO:49, SEQ ID NO:56, SEQ ID NO:63, SEQ ID NO:70, SEQ ID NO:77, SEQ ID NO:81, SEQ ID NO:88, SEQ ID NO:95, SEQ ID NO:102, SEQ ID NO:106, SEQ ID NO:110, SEQ ID NO: 117, SEQ ID NO:124, SEQ ID NO:131, SEQ ID NO:138, SEQ ID NO:50, SEQ ID NO:57, SEQ ID NO:64, SEQ ID NO:71, SEQ ID NO:78, SEQ ID NO:82, SEQ ID NO:89, SEQ ID NO:96, SEQ ID NO:103, SEQ ID NO:107, SEQ ID NO:111, SEQ ID NO: 118, SEQ ID NO:125, SEQ ID NO:132, SEQ ID NO:139, SEQ ID NO:51, SEQ ID NO:58, SEQ ID NO:65, SEQ ID NO:72, SEQ ID NO:79, SEQ ID NO:83, SEQ ID NO:90, SEQ ID NO:97, SEQ ID NO:104, SEQ ID NO:108, SEQ ID NO: 112, SEQ ID NO: 119, SEQ ID NO:126, SEQ ID NO:133, or SEQ ID NO:140. In certain embodiments, the functional fragment as described herein is a fragment of a polypeptide that comprises an amino acid sequence that is 97% identical to the amino acid sequence of SEQ ID NO:1, SEQ ID NO:2, SEQ ID NO:3, SEQ ID NO:4, SEQ ID NO:5, SEQ ID NO:6, SEQ ID NO:7, SEQ ID NO:8, SEQ ID NO:9, SEQ ID NO:10, SEQ ID NO: 11, SEQ ID NO:12, SEQ ID NO:13, SEQ ID NO:14, SEQ ID NO:15, SEQ ID NO:16, SEQ ID NO:17, SEQ ID NO:18, SEQ ID NO:19, SEQ ID NO:20, SEQ ID NO:21, SEQ ID NO:22, SEQ ID NO:23, SEQ ID NO:24, SEQ ID NO:48, SEQ ID NO:52, SEQ ID NO:59, SEQ ID NO:66, SEQ ID NO:73, SEQ ID NO:80, SEQ ID NO:84, SEQ ID NO:91, SEQ ID NO:98, SEQ ID NO:105, SEQ ID NO:109, SEQ ID NO:113, SEQ ID NO:120, SEQ ID NO:127, SEQ ID NO:134, SEQ ID NO:49, SEQ ID NO:56, SEQ ID NO:63, SEQ ID NO:70, SEQ ID NO:77, SEQ ID NO:81, SEQ ID NO:88, SEQ ID NO:95, SEQ ID NO:102, SEQ ID NO:106, SEQ ID NO:110, SEQ ID NO:117, SEQ ID NO:124, SEQ ID NO:131, SEQ ID NO:138, SEQ ID NO:50, SEQ ID NO:57, SEQ ID NO:64, SEQ ID NO:71, SEQ ID NO:78, SEQ ID NO:82, SEQ ID NO:89, SEQ ID NO:96, SEQ ID NO:103, SEQ ID NO:107, SEQ ID NO:111, SEQ ID NO: 118, SEQ ID NO:125, SEQ ID NO:132, SEQ ID NO:139, SEQ ID NO:51, SEQ ID NO:58, SEQ ID NO:65, SEQ ID NO:72, SEQ ID NO:79, SEQ ID NO:83, SEQ ID NO:90, SEQ ID NO:97, SEQ ID NO:104, SEQ ID NO:108, SEQ ID NO:112, SEQ ID NO:119, SEQ ID NO:126, SEQ ID NO:133, or SEQ ID NO:140. In certain embodiments, the functional fragment as described herein is a fragment of a polypeptide that comprises an amino acid sequence that is 98% identical to the amino acid sequence of SEQ ID NO:1, SEQ ID NO:2, SEQ ID NO:3, SEQ ID NO:4, SEQ ID NO:5, SEQ ID NO:6, SEQ ID NO:7, SEQ ID NO:8, SEQ ID NO:9, SEQ ID NO:10, SEQ ID NO: 11, SEQ ID NO:12, SEQ ID NO:13, SEQ ID NO:14, SEQ ID NO:15, SEQ ID NO:16, SEQ ID NO:17, SEQ ID NO:18, SEQ ID NO:19, SEQ ID NO:20, SEQ ID NO:21, SEQ ID NO:22, SEQ ID NO:23, SEQ ID NO:24, SEQ ID NO:48, SEQ ID NO:52, SEQ ID NO:59, SEQ ID NO:66, SEQ ID NO:73, SEQ ID NO:80, SEQ ID NO:84, SEQ ID NO:91, SEQ ID NO:98, SEQ ID NO:105, SEQ ID NO:109, SEQ ID NO:113, SEQ ID NO:120, SEQ ID NO:127, SEQ ID NO:134, SEQ ID NO:49, SEQ ID NO:56, SEQ ID NO:63, SEQ ID NO:70, SEQ ID NO:77, SEQ ID NO:81, SEQ ID NO:88, SEQ ID NO:95, SEQ ID NO:102, SEQ ID NO:106, SEQ ID NO:110, SEQ ID NO: 117, SEQ ID NO:124, SEQ ID NO:131, SEQ ID NO:138, SEQ ID NO:50, SEQ ID NO:57, SEQ ID NO:64, SEQ ID NO:71, SEQ ID NO:78, SEQ ID NO:82, SEQ ID NO:89, SEQ ID NO:96, SEQ ID NO:103, SEQ ID NO:107, SEQ ID NO:111, SEQ ID NO: 118, SEQ ID NO:125, SEQ ID NO:132, SEQ ID NO:139, SEQ ID NO:51, SEQ ID NO:58, SEQ ID NO:65, SEQ ID NO:72, SEQ ID NO:79, SEQ ID NO:83, SEQ ID NO:90, SEQ ID NO:97, SEQ ID NO:104, SEQ ID NO:108, SEQ ID NO: 112, SEQ ID NO: 119, SEQ ID NO:126, SEQ ID NO:133, or SEQ ID NO:140. In certain embodiments, the functional fragment as described herein is a fragment of a polypeptide that comprises an amino acid sequence that is 99% identical to the amino acid sequence of SEQ ID NO:1, SEQ ID NO:2, SEQ ID NO:3, SEQ ID NO:4, SEQ ID NO:5, SEQ ID NO:6, SEQ ID NO:7, SEQ ID NO:8, SEQ ID NO:9, SEQ ID NO:10, SEQ ID NO: 11, SEQ ID NO:12, SEQ ID NO:13, SEQ ID NO:14, SEQ ID NO:15, SEQ ID NO:16, SEQ ID NO:17, SEQ ID NO:18, SEQ ID NO:19, SEQ ID NO:20, SEQ ID NO:21, SEQ ID NO:22, SEQ ID NO:23, SEQ ID NO:24, SEQ ID NO:48, SEQ ID NO:52, SEQ ID NO:59, SEQ ID NO:66, SEQ ID NO:73, SEQ ID NO:80, SEQ ID NO:84, SEQ ID NO:91, SEQ ID NO:98, SEQ ID NO:105, SEQ ID NO:109, SEQ ID NO:113, SEQ ID NO:120, SEQ ID NO:127, SEQ ID NO:134, SEQ ID NO:49, SEQ ID NO:56, SEQ ID NO:63, SEQ ID NO:70, SEQ ID NO:77, SEQ ID NO:81, SEQ ID NO:88, SEQ ID NO:95, SEQ ID NO:102, SEQ ID NO:106, SEQ ID NO:110, SEQ ID NO:117, SEQ ID NO:124, SEQ ID NO:131, SEQ ID NO:138, SEQ ID NO:50, SEQ ID NO:57, SEQ ID NO:64, SEQ ID NO:71, SEQ ID NO:78, SEQ ID NO:82, SEQ ID NO:89, SEQ ID NO:96, SEQ ID NO:103, SEQ ID NO:107, SEQ ID NO:111, SEQ ID NO: 118, SEQ ID NO:125, SEQ ID NO:132, SEQ ID NO:139, SEQ ID NO:51, SEQ ID NO:58, SEQ ID NO:65, SEQ ID NO:72, SEQ ID NO:79, SEQ ID NO:83, SEQ ID NO:90, SEQ ID NO:97, SEQ ID NO:104, SEQ ID NO:108, SEQ ID NO:112, SEQ ID NO:119, SEQ ID NO:126, SEQ ID NO:133, or SEQ ID NO:140.

[0229] In certain embodiments, the functional fragment as described herein comprises an amino acid that is at least 80% identical to the amino acid sequence of a fragment of a polypeptide comprising the amino acid sequence of SEQ ID NO:1, SEQ ID NO:2, SEQ ID NO:3, SEQ ID NO:4, SEQ ID NO:5, SEQ ID NO:6, SEQ ID NO:7, SEQ ID NO:8, SEQ ID NO:9, SEQ ID NO:10, SEQ ID NO: 11, SEQ ID NO:12, SEQ ID NO:13, SEQ ID NO:14, SEQ ID NO:15, SEQ ID NO:16, SEQ ID NO:17, SEQ ID NO:18, SEQ ID NO:19, SEQ ID NO:20, SEQ ID NO:21, SEQ ID NO:22, SEQ ID NO:23, SEQ ID NO:24, SEQ ID NO:48, SEQ ID NO:52, SEQ ID NO:59, SEQ ID NO:66, SEQ ID NO:73, SEQ ID NO:80, SEQ ID NO:84, SEQ ID NO:91, SEQ ID NO:98, SEQ ID NO:105, SEQ ID NO:109, SEQ ID NO:113, SEQ ID NO:120, SEQ ID NO:127, SEQ ID NO:134, SEQ ID NO:49, SEQ ID NO:56, SEQ ID NO:63, SEQ ID NO:70, SEQ ID NO:77, SEQ ID NO:81, SEQ ID NO:88, SEQ ID NO:95, SEQ ID NO:102, SEQ ID NO:106, SEQ ID NO:110, SEQ ID NO: 117, SEQ ID NO:124, SEQ ID NO:131, SEQ ID NO:138, SEQ ID NO:50, SEQ ID NO:57, SEQ ID NO:64, SEQ ID NO:71, SEQ ID NO:78, SEQ ID NO:82, SEQ ID NO:89, SEQ ID NO:96, SEQ ID NO:103, SEQ ID NO:107, SEQ ID NO:111, SEQ ID NO: 118, SEQ ID NO:125, SEQ ID NO:132, SEQ ID NO:139, SEQ ID NO:51, SEQ ID NO:58, SEQ ID NO:65, SEQ ID NO:72, SEQ ID NO:79, SEQ ID NO:83, SEQ ID NO:90, SEQ ID NO:97, SEQ ID NO:104, SEQ ID NO:108, SEQ ID NO: 112, SEQ ID NO: 119, SEQ ID NO:126, SEQ ID NO:133, or SEQ ID NO:140. In certain embodiments, the functional fragment as described herein comprises an amino acid that is at least 85% identical to the amino acid sequence of a fragment of a polypeptide comprising the amino acid sequence of SEQ ID NO:1, SEQ ID NO:2, SEQ ID NO:3, SEQ ID NO:4, SEQ ID NO:5, SEQ ID NO:6, SEQ ID NO:7, SEQ ID NO:8, SEQ ID NO:9, SEQ ID NO:10, SEQ ID NO:11, SEQ ID NO:12, SEQ ID NO:13, SEQ ID NO:14, SEQ ID NO:15, SEQ ID NO:16, SEQ ID NO:17, SEQ ID NO:18, SEQ ID NO:19, SEQ ID NO:20, SEQ ID NO:21, SEQ ID NO:22, SEQ ID NO:23, SEQ ID NO:24, SEQ ID NO:48, SEQ ID NO:52, SEQ ID NO:59, SEQ ID NO:66, SEQ ID NO:73, SEQ ID NO:80, SEQ ID NO:84, SEQ ID NO:91, SEQ ID NO:98, SEQ ID NO:105, SEQ ID NO:109, SEQ ID NO:113, SEQ ID NO:120, SEQ ID NO:127, SEQ ID NO:134, SEQ ID NO:49, SEQ ID NO:56, SEQ ID NO:63, SEQ ID NO:70, SEQ ID NO:77, SEQ ID NO:81, SEQ ID NO:88, SEQ ID NO:95, SEQ ID NO:102, SEQ ID NO:106, SEQ ID NO:110, SEQ ID NO: 117, SEQ ID NO:124, SEQ ID NO:131, SEQ ID NO:138, SEQ ID NO:50, SEQ ID NO:57, SEQ ID NO:64, SEQ ID NO:71, SEQ ID NO:78, SEQ ID NO:82, SEQ ID NO:89, SEQ ID NO:96, SEQ ID NO:103, SEQ ID NO:107, SEQ ID NO:111, SEQ ID NO: 118, SEQ ID NO:125, SEQ ID NO:132, SEQ ID NO:139, SEQ ID NO:51, SEQ ID NO:58, SEQ ID NO:65, SEQ ID NO:72, SEQ ID NO:79, SEQ ID NO:83, SEQ ID NO:90, SEQ ID NO:97, SEQ ID NO:104, SEQ ID NO:108, SEQ ID NO: 112, SEQ ID NO: 119, SEQ ID NO:126, SEQ ID NO:133, or SEQ ID NO:140. In certain embodiments, the functional fragment as described herein comprises an amino acid that is at least 90% identical to the amino acid sequence of a fragment of a polypeptide comprising the amino acid sequence of SEQ ID NO:1, SEQ ID NO:2, SEQ ID NO:3, SEQ ID NO:4, SEQ ID NO:5, SEQ ID NO:6, SEQ ID NO:7, SEQ ID NO:8, SEQ ID NO:9, SEQ ID NO:10, SEQ ID NO:11, SEQ ID NO:12, SEQ ID NO:13, SEQ ID NO:14, SEQ ID NO:15, SEQ ID NO:16, SEQ ID NO:17, SEQ ID NO:18, SEQ ID NO:19, SEQ ID NO:20, SEQ ID NO:21, SEQ ID NO:22, SEQ ID NO:23, SEQ ID NO:24, SEQ ID NO:48, SEQ ID NO:52, SEQ ID NO:59, SEQ ID NO:66, SEQ ID NO:73, SEQ ID NO:80, SEQ ID NO:84, SEQ ID NO:91, SEQ ID NO:98, SEQ ID NO:105, SEQ ID NO:109, SEQ ID NO:113, SEQ ID NO:120, SEQ ID NO:127, SEQ ID NO:134, SEQ ID NO:49, SEQ ID NO:56, SEQ ID NO:63, SEQ ID NO:70, SEQ ID NO:77, SEQ ID NO:81, SEQ ID NO:88, SEQ ID NO:95, SEQ ID NO:102, SEQ ID NO:106, SEQ ID NO:110, SEQ ID NO: 117, SEQ ID NO:124, SEQ ID NO:131, SEQ ID NO:138, SEQ ID NO:50, SEQ ID NO:57, SEQ ID NO:64, SEQ ID NO:71, SEQ ID NO:78, SEQ ID NO:82, SEQ ID NO:89, SEQ ID NO:96, SEQ ID NO:103, SEQ ID NO:107, SEQ ID NO:111, SEQ ID NO: 118, SEQ ID NO:125, SEQ ID NO:132, SEQ ID NO:139, SEQ ID NO:51, SEQ ID NO:58, SEQ ID NO:65, SEQ ID NO:72, SEQ ID NO:79, SEQ ID NO:83, SEQ ID NO:90, SEQ ID NO:97, SEQ ID NO:104, SEQ ID NO:108, SEQ ID NO: 112, SEQ ID NO: 119, SEQ ID NO:126, SEQ ID NO:133, or SEQ ID NO:140. In certain embodiments, the functional fragment as described herein comprises an amino acid that is at least 95% identical to the amino acid sequence of a fragment of a polypeptide comprising the amino acid sequence of SEQ ID NO:1, SEQ ID NO:2, SEQ ID NO:3, SEQ ID NO:4, SEQ ID NO:5, SEQ ID NO:6, SEQ ID NO:7, SEQ ID NO:8, SEQ ID NO:9, SEQ ID NO:10, SEQ ID NO:11, SEQ ID NO:12, SEQ ID NO:13, SEQ ID NO:14, SEQ ID NO:15, SEQ ID NO:16, SEQ ID NO:17, SEQ ID NO:18, SEQ ID NO:19, SEQ ID NO:20, SEQ ID NO:21, SEQ ID NO:22, SEQ ID NO:23, SEQ ID NO:24, SEQ ID NO:48, SEQ ID NO:52, SEQ ID NO:59, SEQ ID NO:66, SEQ ID NO:73, SEQ ID NO:80, SEQ ID NO:84, SEQ ID NO:91, SEQ ID NO:98, SEQ ID NO:105, SEQ ID NO:109, SEQ ID NO:113, SEQ ID NO:120, SEQ ID NO:127, SEQ ID NO:134, SEQ ID NO:49, SEQ ID NO:56, SEQ ID NO:63, SEQ ID NO:70, SEQ ID NO:77, SEQ ID NO:81, SEQ ID NO:88, SEQ ID NO:95, SEQ ID NO:102, SEQ ID NO:106, SEQ ID NO:110, SEQ ID NO: 117, SEQ ID NO:124, SEQ ID NO:131, SEQ ID NO:138, SEQ ID NO:50, SEQ ID NO:57, SEQ ID NO:64, SEQ ID NO:71, SEQ ID NO:78, SEQ ID NO:82, SEQ ID NO:89, SEQ ID NO:96, SEQ ID NO:103, SEQ ID NO:107, SEQ ID NO:111, SEQ ID NO: 118, SEQ ID NO:125, SEQ ID NO:132, SEQ ID NO:139, SEQ ID NO:51, SEQ ID NO:58, SEQ ID NO:65, SEQ ID NO:72, SEQ ID NO:79, SEQ ID NO:83, SEQ ID NO:90, SEQ ID NO:97, SEQ ID NO:104, SEQ ID NO:108, SEQ ID NO: 112, SEQ ID NO: 119, SEQ ID NO:126, SEQ ID NO:133, or SEQ ID NO:140. In certain embodiments, the functional fragment as described herein comprises an amino acid that is at least 96% identical to the amino acid sequence of a fragment of a polypeptide comprising the amino acid sequence of SEQ ID NO:1, SEQ ID NO:2, SEQ ID NO:3, SEQ ID NO:4, SEQ ID NO:5, SEQ ID NO:6, SEQ ID NO:7, SEQ ID NO:8, SEQ ID NO:9, SEQ ID NO:10, SEQ ID NO:11, SEQ ID NO:12, SEQ ID NO:13, SEQ ID NO:14, SEQ ID NO:15, SEQ ID NO:16, SEQ ID NO:17, SEQ ID NO:18, SEQ ID NO:19, SEQ ID NO:20, SEQ ID NO:21, SEQ ID NO:22, SEQ ID NO:23, SEQ ID NO:24, SEQ ID NO:48, SEQ ID NO:52, SEQ ID NO:59, SEQ ID NO:66, SEQ ID NO:73, SEQ ID NO:80, SEQ ID NO:84, SEQ ID NO:91, SEQ ID NO:98, SEQ ID NO:105, SEQ ID NO:109, SEQ ID NO:113, SEQ ID NO:120, SEQ ID NO:127, SEQ ID NO:134, SEQ ID NO:49, SEQ ID NO:56, SEQ ID NO:63, SEQ ID NO:70, SEQ ID NO:77, SEQ ID NO:81, SEQ ID NO:88, SEQ ID NO:95, SEQ ID NO:102, SEQ ID NO:106, SEQ ID NO:110, SEQ ID NO: 117, SEQ ID NO:124, SEQ ID NO:131, SEQ ID NO:138, SEQ ID NO:50, SEQ ID NO:57, SEQ ID NO:64, SEQ ID NO:71, SEQ ID NO:78, SEQ ID NO:82, SEQ ID NO:89, SEQ ID NO:96, SEQ ID NO:103, SEQ ID NO:107, SEQ ID NO:111, SEQ ID NO: 118, SEQ ID NO:125, SEQ ID NO:132, SEQ ID NO:139, SEQ ID NO:51, SEQ ID NO:58, SEQ ID NO:65, SEQ ID NO:72, SEQ ID NO:79, SEQ ID NO:83, SEQ ID NO:90, SEQ ID NO:97, SEQ ID NO:104, SEQ ID NO:108, SEQ ID NO: 112, SEQ ID NO: 119, SEQ ID NO:126, SEQ ID NO:133, or SEQ ID NO:140. In certain embodiments, the functional fragment as described herein comprises an amino acid that is at least 97% identical to the amino acid sequence of a fragment of a polypeptide comprising the amino acid sequence of SEQ ID NO:1, SEQ ID NO:2, SEQ ID NO:3, SEQ ID NO:4, SEQ ID NO:5, SEQ ID NO:6, SEQ ID NO:7, SEQ ID NO:8, SEQ ID NO:9, SEQ ID NO:10, SEQ ID NO:11, SEQ ID NO:12, SEQ ID NO:13, SEQ ID NO:14, SEQ ID NO:15, SEQ ID NO:16, SEQ ID NO:17, SEQ ID NO:18, SEQ ID NO:19, SEQ ID NO:20, SEQ ID NO:21, SEQ ID NO:22, SEQ ID NO:23, SEQ ID NO:24, SEQ ID NO:48, SEQ ID NO:52, SEQ ID NO:59, SEQ ID NO:66, SEQ ID NO:73, SEQ ID NO:80, SEQ ID NO:84, SEQ ID NO:91, SEQ ID NO:98, SEQ ID NO:105, SEQ ID NO:109, SEQ ID NO:113, SEQ ID NO:120, SEQ ID NO:127, SEQ ID NO:134, SEQ ID NO:49, SEQ ID NO:56, SEQ ID NO:63, SEQ ID NO:70, SEQ ID NO:77, SEQ ID NO:81, SEQ ID NO:88, SEQ ID NO:95, SEQ ID NO:102, SEQ ID NO:106, SEQ ID NO:110, SEQ ID NO: 117, SEQ ID NO:124, SEQ ID NO:131, SEQ ID NO:138, SEQ ID NO:50, SEQ ID NO:57, SEQ ID NO:64, SEQ ID NO:71, SEQ ID NO:78, SEQ ID NO:82, SEQ ID NO:89, SEQ ID NO:96, SEQ ID NO:103, SEQ ID NO:107, SEQ ID NO:111, SEQ ID NO: 118, SEQ ID NO:125, SEQ ID NO:132, SEQ ID NO:139, SEQ ID NO:51, SEQ ID NO:58, SEQ ID NO:65, SEQ ID NO:72, SEQ ID NO:79, SEQ ID NO:83, SEQ ID NO:90, SEQ ID NO:97, SEQ ID NO:104, SEQ ID NO:108, SEQ ID NO: 112, SEQ ID NO: 119, SEQ ID NO:126, SEQ ID NO:133, or SEQ ID NO:140. In certain embodiments, the functional fragment as described herein comprises an amino acid that is at least 98% identical to the amino acid sequence of a fragment of a polypeptide comprising the amino acid sequence of SEQ ID NO:1, SEQ ID NO:2, SEQ ID NO:3, SEQ ID NO:4, SEQ ID NO:5, SEQ ID NO:6, SEQ ID NO:7, SEQ ID NO:8, SEQ ID NO:9, SEQ ID NO:10, SEQ ID NO:11, SEQ ID NO:12, SEQ ID NO:13, SEQ ID NO:14, SEQ ID NO:15, SEQ ID NO:16, SEQ ID NO:17, SEQ ID NO:18, SEQ ID NO:19, SEQ ID NO:20, SEQ ID NO:21, SEQ ID NO:22, SEQ ID NO:23, SEQ ID NO:24, SEQ ID NO:48, SEQ ID NO:52, SEQ ID NO:59, SEQ ID NO:66, SEQ ID NO:73, SEQ ID NO:80, SEQ ID NO:84, SEQ ID NO:91, SEQ ID NO:98, SEQ ID NO:105, SEQ ID NO:109, SEQ ID NO:113, SEQ ID NO:120, SEQ ID NO:127, SEQ ID NO:134, SEQ ID NO:49, SEQ ID NO:56, SEQ ID NO:63, SEQ ID NO:70, SEQ ID NO:77, SEQ ID NO:81, SEQ ID NO:88, SEQ ID NO:95, SEQ ID NO:102, SEQ ID NO:106, SEQ ID NO:110, SEQ ID NO: 117, SEQ ID NO:124, SEQ ID NO:131, SEQ ID NO:138, SEQ ID NO:50, SEQ ID NO:57, SEQ ID NO:64, SEQ ID NO:71, SEQ ID NO:78, SEQ ID NO:82, SEQ ID NO:89, SEQ ID NO:96, SEQ ID NO:103, SEQ ID NO:107, SEQ ID NO:111, SEQ ID NO: 118, SEQ ID NO:125, SEQ ID NO:132, SEQ ID NO:139, SEQ ID NO:51, SEQ ID NO:58, SEQ ID NO:65, SEQ ID NO:72, SEQ ID NO:79, SEQ ID NO:83, SEQ ID NO:90, SEQ ID NO:97, SEQ ID NO:104, SEQ ID NO:108, SEQ ID NO: 112, SEQ ID NO: 119, SEQ ID NO:126, SEQ ID NO:133, or SEQ ID NO:140. In certain embodiments, the functional fragment as described herein comprises an amino acid that is at least 99% identical to the amino acid sequence of a fragment of a polypeptide comprising the amino acid sequence of SEQ ID NO:1, SEQ ID NO:2, SEQ ID NO:3, SEQ ID NO:4, SEQ ID NO:5, SEQ ID NO:6, SEQ ID NO:7, SEQ ID NO:8, SEQ ID NO:9, SEQ ID NO:10, SEQ ID NO:11, SEQ ID NO:12, SEQ ID NO:13, SEQ ID NO:14, SEQ ID NO:15, SEQ ID NO:16, SEQ ID NO:17, SEQ ID NO:18, SEQ ID NO:19, SEQ ID NO:20, SEQ ID NO:21, SEQ ID NO:22, SEQ ID NO:23, SEQ ID NO:24, SEQ ID NO:48, SEQ ID NO:52, SEQ ID NO:59, SEQ ID NO:66, SEQ ID NO:73, SEQ ID NO:80, SEQ ID NO:84, SEQ ID NO:91, SEQ ID NO:98, SEQ ID NO:105, SEQ ID NO:109, SEQ ID NO:113, SEQ ID NO:120, SEQ ID NO:127, SEQ ID NO:134, SEQ ID NO:49, SEQ ID NO:56, SEQ ID NO:63, SEQ ID NO:70, SEQ ID NO:77, SEQ ID NO:81, SEQ ID NO:88, SEQ ID NO:95, SEQ ID NO:102, SEQ ID NO:106, SEQ ID NO:110, SEQ ID NO: 117, SEQ ID NO:124, SEQ ID NO:131, SEQ ID NO:138, SEQ ID NO:50, SEQ ID NO:57, SEQ ID NO:64, SEQ ID NO:71, SEQ ID NO:78, SEQ ID NO:82, SEQ ID NO:89, SEQ ID NO:96, SEQ ID NO:103, SEQ ID NO:107, SEQ ID NO:111, SEQ ID NO: 118, SEQ ID NO:125, SEQ ID NO:132, SEQ ID NO:139, SEQ ID NO:51, SEQ ID NO:58, SEQ ID NO:65, SEQ ID NO:72, SEQ ID NO:79, SEQ ID NO:83, SEQ ID NO:90, SEQ ID NO:97, SEQ ID NO:104, SEQ ID NO:108, SEQ ID NO: 112, SEQ ID NO: 119, SEQ ID NO:126, SEQ ID NO:133, or SEQ ID NO:140. In certain embodiments, the functional fragment as described herein comprises an amino acid that is 100% identical to the amino acid sequence of a fragment of a polypeptide comprising the amino acid sequence of SEQ ID NO:1, SEQ ID NO:2, SEQ ID NO:3, SEQ ID NO:4, SEQ ID NO:5, SEQ ID NO:6, SEQ ID NO:7, SEQ ID NO:8, SEQ ID NO:9, SEQ ID NO:10, SEQ ID NO: 11, SEQ ID NO:12, SEQ ID NO:13, SEQ ID NO:14, SEQ ID NO:15, SEQ ID NO:16, SEQ ID NO:17, SEQ ID NO:18, SEQ ID NO:19, SEQ ID NO:20, SEQ ID NO:21, SEQ ID NO:22, SEQ ID NO:23, SEQ ID NO:24, SEQ ID NO:48, SEQ ID NO:52, SEQ ID NO:59, SEQ ID NO:66, SEQ ID NO:73, SEQ ID NO:80, SEQ ID NO:84, SEQ ID NO:91, SEQ ID NO:98, SEQ ID NO:105, SEQ ID NO:109, SEQ ID NO:113, SEQ ID NO:120, SEQ ID NO:127, SEQ ID NO:134, SEQ ID NO:49, SEQ ID NO:56, SEQ ID NO:63, SEQ ID NO:70, SEQ ID NO:77, SEQ ID NO:81, SEQ ID NO:88, SEQ ID NO:95, SEQ ID NO:102, SEQ ID NO:106, SEQ ID NO:110, SEQ ID NO: 117, SEQ ID NO:124, SEQ ID NO:131, SEQ ID NO:138, SEQ ID NO:50, SEQ ID NO:57, SEQ ID NO:64, SEQ ID NO:71, SEQ ID NO:78, SEQ ID NO:82, SEQ ID NO:89, SEQ ID NO:96, SEQ ID NO:103, SEQ ID NO:107, SEQ ID NO:111, SEQ ID NO: 118, SEQ ID NO:125, SEQ ID NO:132, SEQ ID NO:139, SEQ ID NO:51, SEQ ID NO:58, SEQ ID NO:65, SEQ ID NO:72, SEQ ID NO:79, SEQ ID NO:83, SEQ ID NO:90, SEQ ID NO:97, SEQ ID NO:104, SEQ ID NO:108, SEQ ID NO: 112, SEQ ID NO: 119, SEQ ID NO:126, SEQ ID NO:133, or SEQ ID NO:140. In certain embodiments, the functional fragment as described herein comprises an amino acid that is 80% identical to the amino acid sequence of a fragment of a polypeptide comprising the amino acid sequence of SEQ ID NO:1, SEQ ID NO:2, SEQ ID NO:3, SEQ ID NO:4, SEQ ID NO:5, SEQ ID NO:6, SEQ ID NO:7, SEQ ID NO:8, SEQ ID NO:9, SEQ ID NO:10, SEQ ID NO: 11, SEQ ID NO:12, SEQ ID NO:13, SEQ ID NO:14, SEQ ID NO:15, SEQ ID NO:16, SEQ ID NO:17, SEQ ID NO:18, SEQ ID NO:19, SEQ ID NO:20, SEQ ID NO:21, SEQ ID NO:22, SEQ ID NO:23, SEQ ID NO:24, SEQ ID NO:48, SEQ ID NO:52, SEQ ID NO:59, SEQ ID NO:66, SEQ ID NO:73, SEQ ID NO:80, SEQ ID NO:84, SEQ ID NO:91, SEQ ID NO:98, SEQ ID NO:105, SEQ ID NO:109, SEQ ID NO:113, SEQ ID NO:120, SEQ ID NO:127, SEQ ID NO:134, SEQ ID NO:49, SEQ ID NO:56, SEQ ID NO:63, SEQ ID NO:70, SEQ ID NO:77, SEQ ID NO:81, SEQ ID NO:88, SEQ ID NO:95, SEQ ID NO:102, SEQ ID NO:106, SEQ ID NO:110, SEQ ID NO: 117, SEQ ID NO:124, SEQ ID NO:131, SEQ ID NO:138, SEQ ID NO:50, SEQ ID NO:57, SEQ ID NO:64, SEQ ID NO:71, SEQ ID NO:78, SEQ ID NO:82, SEQ ID NO:89, SEQ ID NO:96, SEQ ID NO:103, SEQ ID NO:107, SEQ ID NO:111, SEQ ID NO: 118, SEQ ID NO:125, SEQ ID NO:132, SEQ ID NO:139, SEQ ID NO:51, SEQ ID NO:58, SEQ ID NO:65, SEQ ID NO:72, SEQ ID NO:79, SEQ ID NO:83, SEQ ID NO:90, SEQ ID NO:97, SEQ ID NO:104, SEQ ID NO:108, SEQ ID NO: 112, SEQ ID NO: 119, SEQ ID NO:126, SEQ ID NO:133, or SEQ ID NO:140. In certain embodiments, the functional fragment as described herein comprises an amino acid that is 85% identical to the amino acid sequence of a fragment of a polypeptide comprising the amino acid sequence of SEQ ID NO:1, SEQ ID NO:2, SEQ ID NO:3, SEQ ID NO:4, SEQ ID NO:5, SEQ ID NO:6, SEQ ID NO:7, SEQ ID NO:8, SEQ ID NO:9, SEQ ID NO:10, SEQ ID NO: 11, SEQ ID NO:12, SEQ ID NO:13, SEQ ID NO:14, SEQ ID NO:15, SEQ ID NO:16, SEQ ID NO:17, SEQ ID NO:18, SEQ ID NO:19, SEQ ID NO:20, SEQ ID NO:21, SEQ ID NO:22, SEQ ID NO:23, SEQ ID NO:24, SEQ ID NO:48, SEQ ID NO:52, SEQ ID NO:59, SEQ ID NO:66, SEQ ID NO:73, SEQ ID NO:80, SEQ ID NO:84, SEQ ID NO:91, SEQ ID NO:98, SEQ ID NO:105, SEQ ID NO:109, SEQ ID NO:113, SEQ ID NO:120, SEQ ID NO:127, SEQ ID NO:134, SEQ ID NO:49, SEQ ID NO:56, SEQ ID NO:63, SEQ ID NO:70, SEQ ID NO:77, SEQ ID NO:81, SEQ ID NO:88, SEQ ID NO:95, SEQ ID NO:102, SEQ ID NO:106, SEQ ID NO:110, SEQ ID NO: 117, SEQ ID NO:124, SEQ ID NO:131, SEQ ID NO:138, SEQ ID NO:50, SEQ ID NO:57, SEQ ID NO:64, SEQ ID NO:71, SEQ ID NO:78, SEQ ID NO:82, SEQ ID NO:89, SEQ ID NO:96, SEQ ID NO:103, SEQ ID NO:107, SEQ ID NO:111, SEQ ID NO: 118, SEQ ID NO:125, SEQ ID NO:132, SEQ ID NO:139, SEQ ID NO:51, SEQ ID NO:58, SEQ ID NO:65, SEQ ID NO:72, SEQ ID NO:79, SEQ ID NO:83, SEQ ID NO:90, SEQ ID NO:97, SEQ ID NO:104, SEQ ID NO:108, SEQ ID NO: 112, SEQ ID NO: 119, SEQ ID NO:126, SEQ ID NO:133, or SEQ ID NO:140. In certain embodiments, the functional fragment as described herein comprises an amino acid that is 90% identical to the amino acid sequence of a fragment of a polypeptide comprising the amino acid sequence of SEQ ID NO:1, SEQ ID NO:2, SEQ ID NO:3, SEQ ID NO:4, SEQ ID NO:5, SEQ ID NO:6, SEQ ID NO:7, SEQ ID NO:8, SEQ ID NO:9, SEQ ID NO:10, SEQ ID NO: 11, SEQ ID NO:12, SEQ ID NO:13, SEQ ID NO:14, SEQ ID NO:15, SEQ ID NO:16, SEQ ID NO:17, SEQ ID NO:18, SEQ ID NO:19, SEQ ID NO:20, SEQ ID NO:21, SEQ ID NO:22, SEQ ID NO:23, SEQ ID NO:24, SEQ ID NO:48, SEQ ID NO:52, SEQ ID NO:59, SEQ ID NO:66, SEQ ID NO:73, SEQ ID NO:80, SEQ ID NO:84, SEQ ID NO:91, SEQ ID NO:98, SEQ ID NO:105, SEQ ID NO:109, SEQ ID NO:113, SEQ ID NO:120, SEQ ID NO:127, SEQ ID NO:134, SEQ ID NO:49, SEQ ID NO:56, SEQ ID NO:63, SEQ ID NO:70, SEQ ID NO:77, SEQ ID NO:81, SEQ ID NO:88, SEQ ID NO:95, SEQ ID NO:102, SEQ ID NO:106, SEQ ID NO:110, SEQ ID NO: 117, SEQ ID NO:124, SEQ ID NO:131, SEQ ID NO:138, SEQ ID NO:50, SEQ ID NO:57, SEQ ID NO:64, SEQ ID NO:71, SEQ ID NO:78, SEQ ID NO:82, SEQ ID NO:89, SEQ ID NO:96, SEQ ID NO:103, SEQ ID NO:107, SEQ ID NO:111, SEQ ID NO: 118, SEQ ID NO:125, SEQ ID NO:132, SEQ ID NO:139, SEQ ID NO:51, SEQ ID NO:58, SEQ ID NO:65, SEQ ID NO:72, SEQ ID NO:79, SEQ ID NO:83, SEQ ID NO:90, SEQ ID NO:97, SEQ ID NO:104, SEQ ID NO:108, SEQ ID NO: 112, SEQ ID NO: 119, SEQ ID NO:126, SEQ ID NO:133, or SEQ ID NO:140. In certain embodiments, the functional fragment as described herein comprises an amino acid that is 95% identical to the amino acid sequence of a fragment of a polypeptide comprising the amino acid sequence of SEQ ID NO:1, SEQ ID NO:2, SEQ ID NO:3, SEQ ID NO:4, SEQ ID NO:5, SEQ ID NO:6, SEQ ID NO:7, SEQ ID NO:8, SEQ ID NO:9, SEQ ID NO:10, SEQ ID NO: 11, SEQ ID NO:12, SEQ ID NO:13, SEQ ID NO:14, SEQ ID NO:15, SEQ ID NO:16, SEQ ID NO:17, SEQ ID NO:18, SEQ ID NO:19, SEQ ID NO:20, SEQ ID NO:21, SEQ ID NO:22, SEQ ID NO:23, SEQ ID NO:24, SEQ ID NO:48, SEQ ID NO:52, SEQ ID NO:59, SEQ ID NO:66, SEQ ID NO:73, SEQ ID NO:80, SEQ ID NO:84, SEQ ID NO:91, SEQ ID NO:98, SEQ ID NO:105, SEQ ID NO:109, SEQ ID NO:113, SEQ ID NO:120, SEQ ID NO:127, SEQ ID NO:134, SEQ ID NO:49, SEQ ID NO:56, SEQ ID NO:63, SEQ ID NO:70, SEQ ID NO:77, SEQ ID NO:81, SEQ ID NO:88, SEQ ID NO:95, SEQ ID NO:102, SEQ ID NO:106, SEQ ID NO:110, SEQ ID NO: 117, SEQ ID NO:124, SEQ ID NO:131, SEQ ID NO:138, SEQ ID NO:50, SEQ ID NO:57, SEQ ID NO:64, SEQ ID NO:71, SEQ ID NO:78, SEQ ID NO:82, SEQ ID NO:89, SEQ ID NO:96, SEQ ID NO:103, SEQ ID NO:107, SEQ ID NO:111, SEQ ID NO: 118, SEQ ID NO:125, SEQ ID NO:132, SEQ ID NO:139, SEQ ID NO:51, SEQ ID NO:58, SEQ ID NO:65, SEQ ID NO:72, SEQ ID NO:79, SEQ ID NO:83, SEQ ID NO:90, SEQ ID NO:97, SEQ ID NO:104, SEQ ID NO:108, SEQ ID NO: 112, SEQ ID NO: 119, SEQ ID NO:126, SEQ ID NO:133, or SEQ ID NO:140. In certain embodiments, the functional fragment as described herein comprises an amino acid that is 96% identical to the amino acid sequence of a fragment of a polypeptide comprising the amino acid sequence of SEQ ID NO:1, SEQ ID NO:2, SEQ ID NO:3, SEQ ID NO:4, SEQ ID NO:5, SEQ ID NO:6, SEQ ID NO:7, SEQ ID NO:8, SEQ ID NO:9, SEQ ID NO:10, SEQ ID NO: 11, SEQ ID NO:12, SEQ ID NO:13, SEQ ID NO:14, SEQ ID NO:15, SEQ ID NO:16, SEQ ID NO:17, SEQ ID NO:18, SEQ ID NO:19, SEQ ID NO:20, SEQ ID NO:21, SEQ ID NO:22, SEQ ID NO:23, SEQ ID NO:24, SEQ ID NO:48, SEQ ID NO:52, SEQ ID NO:59, SEQ ID NO:66, SEQ ID NO:73, SEQ ID NO:80, SEQ ID NO:84, SEQ ID NO:91, SEQ ID NO:98, SEQ ID NO:105, SEQ ID NO:109, SEQ ID NO:113, SEQ ID NO:120, SEQ ID NO:127, SEQ ID NO:134, SEQ ID NO:49, SEQ ID NO:56, SEQ ID NO:63, SEQ ID NO:70, SEQ ID NO:77, SEQ ID NO:81, SEQ ID NO:88, SEQ ID NO:95, SEQ ID NO:102, SEQ ID NO:106, SEQ ID NO:110, SEQ ID NO: 117, SEQ ID NO:124, SEQ ID NO:131, SEQ ID NO:138, SEQ ID NO:50, SEQ ID NO:57, SEQ ID NO:64, SEQ ID NO:71, SEQ ID NO:78, SEQ ID NO:82, SEQ ID NO:89, SEQ ID NO:96, SEQ ID NO:103, SEQ ID NO:107, SEQ ID NO:111, SEQ ID NO: 118, SEQ ID NO:125, SEQ ID NO:132, SEQ ID NO:139, SEQ ID NO:51, SEQ ID NO:58, SEQ ID NO:65, SEQ ID NO:72, SEQ ID NO:79, SEQ ID NO:83, SEQ ID NO:90, SEQ ID NO:97, SEQ ID NO:104, SEQ ID NO:108, SEQ ID NO: 112, SEQ ID NO: 119, SEQ ID NO:126, SEQ ID NO:133, or SEQ ID NO:140. In certain embodiments, the functional fragment as described herein comprises an amino acid that is 97% identical to the amino acid sequence of a fragment of a polypeptide comprising the amino acid sequence of SEQ ID NO:1, SEQ ID NO:2, SEQ ID NO:3, SEQ ID NO:4, SEQ ID NO:5, SEQ ID NO:6, SEQ ID NO:7, SEQ ID NO:8, SEQ ID NO:9, SEQ ID NO:10, SEQ ID NO: 11, SEQ ID NO:12, SEQ ID NO:13, SEQ ID NO:14, SEQ ID NO:15, SEQ ID NO:16, SEQ ID NO:17, SEQ ID NO:18, SEQ ID NO:19, SEQ ID NO:20, SEQ ID NO:21, SEQ ID NO:22, SEQ ID NO:23, SEQ ID NO:24, SEQ ID NO:48, SEQ ID NO:52, SEQ ID NO:59, SEQ ID NO:66, SEQ ID NO:73, SEQ ID NO:80, SEQ ID NO:84, SEQ ID NO:91, SEQ ID NO:98, SEQ ID NO:105, SEQ ID NO:109, SEQ ID NO:113, SEQ ID NO:120, SEQ ID NO:127, SEQ ID NO:134, SEQ ID NO:49, SEQ ID NO:56, SEQ ID NO:63, SEQ ID NO:70, SEQ ID NO:77, SEQ ID NO:81, SEQ ID NO:88, SEQ ID NO:95, SEQ ID NO:102, SEQ ID NO:106, SEQ ID NO:110, SEQ ID NO: 117, SEQ ID NO:124, SEQ ID NO:131, SEQ ID NO:138, SEQ ID NO:50, SEQ ID NO:57, SEQ ID NO:64, SEQ ID NO:71, SEQ ID NO:78, SEQ ID NO:82, SEQ ID NO:89, SEQ ID NO:96, SEQ ID NO:103, SEQ ID NO:107, SEQ ID NO:111, SEQ ID NO: 118, SEQ ID NO:125, SEQ ID NO:132, SEQ ID NO:139, SEQ ID NO:51, SEQ ID NO:58, SEQ ID NO:65, SEQ ID NO:72, SEQ ID NO:79, SEQ ID NO:83, SEQ ID NO:90, SEQ ID NO:97, SEQ ID NO:104, SEQ ID NO:108, SEQ ID NO: 112, SEQ ID NO: 119, SEQ ID NO:126, SEQ ID NO:133, or SEQ ID NO:140. In certain embodiments, the functional fragment as described herein comprises an amino acid that is 98% identical to the amino acid sequence of a fragment of a polypeptide comprising the amino acid sequence of SEQ ID NO:1, SEQ ID NO:2, SEQ ID NO:3, SEQ ID NO:4, SEQ ID NO:5, SEQ ID NO:6, SEQ ID NO:7, SEQ ID NO:8, SEQ ID NO:9, SEQ ID NO:10, SEQ ID NO: 11, SEQ ID NO:12, SEQ ID NO:13, SEQ ID NO:14, SEQ ID NO:15, SEQ ID NO:16, SEQ ID NO:17, SEQ ID NO:18, SEQ ID NO:19, SEQ ID NO:20, SEQ ID NO:21, SEQ ID NO:22, SEQ ID NO:23, SEQ ID NO:24, SEQ ID NO:48, SEQ ID NO:52, SEQ ID NO:59, SEQ ID NO:66, SEQ ID NO:73, SEQ ID NO:80, SEQ ID NO:84, SEQ ID NO:91, SEQ ID NO:98, SEQ ID NO:105, SEQ ID NO:109, SEQ ID NO:113, SEQ ID NO:120, SEQ ID NO:127, SEQ ID NO:134, SEQ ID NO:49, SEQ ID NO:56, SEQ ID NO:63, SEQ ID NO:70, SEQ ID NO:77, SEQ ID NO:81, SEQ ID NO:88, SEQ ID NO:95, SEQ ID NO:102, SEQ ID NO:106, SEQ ID NO:110, SEQ ID NO: 117, SEQ ID NO:124, SEQ ID NO:131, SEQ ID NO:138, SEQ ID NO:50, SEQ ID NO:57, SEQ ID NO:64, SEQ ID NO:71, SEQ ID NO:78, SEQ ID NO:82, SEQ ID NO:89, SEQ ID NO:96, SEQ ID NO:103, SEQ ID NO:107, SEQ ID NO:111, SEQ ID NO: 118, SEQ ID NO:125, SEQ ID NO:132, SEQ ID NO:139, SEQ ID NO:51, SEQ ID NO:58, SEQ ID NO:65, SEQ ID NO:72, SEQ ID NO:79, SEQ ID NO:83, SEQ ID NO:90, SEQ ID NO:97, SEQ ID NO:104, SEQ ID NO:108, SEQ ID NO: 112, SEQ ID NO: 119, SEQ ID NO:126, SEQ ID NO:133, or SEQ ID NO:140. In certain embodiments, the functional fragment as described herein comprises an amino acid that is 99% identical to the amino acid sequence of a fragment of a polypeptide comprising the amino acid sequence of SEQ ID NO:1, SEQ ID NO:2, SEQ ID NO:3, SEQ ID NO:4, SEQ ID NO:5, SEQ ID NO:6, SEQ ID NO:7, SEQ ID NO:8, SEQ ID NO:9, SEQ ID NO:10, SEQ ID NO: 11, SEQ ID NO:12, SEQ ID NO:13, SEQ ID NO:14, SEQ ID NO:15, SEQ ID NO:16, SEQ ID NO:17, SEQ ID NO:18, SEQ ID NO:19, SEQ ID NO:20, SEQ ID NO:21, SEQ ID NO:22, SEQ ID NO:23, SEQ ID NO:24, SEQ ID NO:48, SEQ ID NO:52, SEQ ID NO:59, SEQ ID NO:66, SEQ ID NO:73, SEQ ID NO:80, SEQ ID NO:84, SEQ ID NO:91, SEQ ID NO:98, SEQ ID NO:105, SEQ ID NO:109, SEQ ID NO:113, SEQ ID NO:120, SEQ ID NO:127, SEQ ID NO:134, SEQ ID NO:49, SEQ ID NO:56, SEQ ID NO:63, SEQ ID NO:70, SEQ ID NO:77, SEQ ID NO:81, SEQ ID NO:88, SEQ ID NO:95, SEQ ID NO:102, SEQ ID NO:106, SEQ ID NO:110, SEQ ID NO: 117, SEQ ID NO:124, SEQ ID NO:131, SEQ ID NO:138, SEQ ID NO:50, SEQ ID NO:57, SEQ ID NO:64, SEQ ID NO:71, SEQ ID NO:78, SEQ ID NO:82, SEQ ID NO:89, SEQ ID NO:96, SEQ ID NO:103, SEQ ID NO:107, SEQ ID NO:111, SEQ ID NO: 118, SEQ ID NO:125, SEQ ID NO:132, SEQ ID NO:139, SEQ ID NO:51, SEQ ID NO:58, SEQ ID NO:65, SEQ ID NO:72, SEQ ID NO:79, SEQ ID NO:83, SEQ ID NO:90, SEQ ID NO:97, SEQ ID NO:104, SEQ ID NO:108, SEQ ID NO: 112, SEQ ID NO: 119, SEQ ID NO:126, SEQ ID NO:133, or SEQ ID NO:140.

### 5.3 Heterologous Non-Arenaviral Polypeptide

[0230] As described herein, in certain embodiments, the heterologous non-arenaviral polypeptide may be not of arenavirus origin.

[0231] In certain embodiments, the nucleotide sequence provided herein (see Section 5.4) comprises a first open reading frame (ORF) that comprises a nucleotide sequence encoding a functional fragment of a first polypeptide selected from the group consisting of arenavirus GP, NP, Z and L, and a second ORF that comprises a nucleotide sequence encoding the heterologous non-arenaviral polypeptide provided herein. In certain embodiments, the nucleotide sequence provided herein comprises an open reading frame (ORF), and the ORF comprises a nucleotide sequence encoding a functional fragment of a first polypeptide selected from the group consisting of arenavirus GP, NP, Z and L that are not from Lassa virus, and a heterologous non-arenaviral polypeptide. In certain embodiments, the arenavirus particle described herein comprises a genome encoding a heterologous polypeptide of arenavirus origin, but derived from a type of arenavirus that is different from the type of arenavirus from which the arenavirus particle comprises GP, NP, Z as well as L. In an exemplary embodiment, the heterologous polypeptide is from Lassa virus, whereas the arenavirus particle comprises the GP, NP, Z as well as L of LCMV or Pichinde virus.

[0232] In certain embodiments, the arenavirus particle provided herein is engineered such that an arenaviral ORF is separated over two or more mRNA transcripts (see Section 5.5). In certain embodiments, one of the mRNA transcripts further comprises a nucleotide sequence encoding a heterologous non-arenaviral polypeptide. In certain embodiments, one of the mRNA transcripts further comprises a nucleotide sequence encoding heterologous polypeptide of arenavirus origin, but derived from a type of arenavirus that is different from the type of arenavirus from which the arenavirus particle comprises GP, NP, Z as well as L. In an exemplary embodiment, the heterologous polypeptide is from Lassa virus, whereas the arenavirus particle comprises the GP, NP, Z as well as L of LCMV or Pichinde virus.

[0233] In certain embodiments, the arenavirus genomic or antigenomic segment provided herein (see Section 5.6) is engineered such that the viral transcription thereof results in a first mRNA transcript comprising a nucleotide sequence encoding a functional fragment of a first polypeptide selected from the group consisting of arenavirus GP, NP, Z and L and a second mRNA transcript comprising a nucleotide sequence encoding a heterologous non-arenaviral polypeptide. In certain embodiments, the arenavirus genomic or antigenomic segment provided herein is engineered such that the viral transcription thereof results in an mRNA transcript encoding a functional fragment of a first polypeptide selected from the group consisting of arenavirus GP, NP, Z and L, and a heterologous non-arenaviral polypeptide or a second polypeptide. In certain embodiments, the arenavirus genomic or antigenomic segment provided herein is engineered such that the viral transcription thereof results in an mRNA transcript encoding a functional fragment of a first polypeptide selected from the group consisting of arenavirus GP, NP, Z and L, and a heterologous polypeptide of arenavirus origin, but derived from a type of arenavirus that is different from the type of arenavirus from which the arenavirus genome comprises GP, NP, Z as well as L. In an exemplary embodiment, the heterologous polypeptide is from Lassa virus, whereas the arenavirus genome comprises the GP, NP, Z as well as L of LCMV or Pichinde virus.

[0234] In certain embodiments, the heterologous non-arenaviral polypeptide is about, at most about, or at least about 5, 8, 10, 12, 15, 18, 20, 22, 25, 28, 30, 32, 35, 38, 40, 42, 45, 48, 50, 52, 55, 58, 60, 65, 70, 75, 80, 85, 90, 95, 100, 150, 200, 250, 300, 350, 400, 450, 500, 550, 600, 650, 700, 750, 800, 850, 900, 950, 1000, or more than 1000 amino acids in length. In certain embodiments, the heterologous non-arenaviral polypeptide is about, at least about, or at most about 5 to 10 amino acids in length, 10 to 25 amino acids in length, 25 to 50 amino acids in length, 50 to 100 amino acids in length, 100 to 150 amino acids in length, 150 to 200 amino acids in length, 200 to 250 amino acids in length, 250 to 300 amino acids in length, 300 to 400 amino acids in length, 300 to 500 amino acids in length, 350 to 600 amino acids in length, 400 to 500 amino acids in length, 500 to 750 amino acids in length, 750 to 1000 amino acids in length, 1000 to 1250 amino acids in length, 1250 to 1500 amino acids in length, 1500 to 1750 amino acids in length, 1750 to 2000 amino acids in length, 2000 to 2500 amino acids in length, or more than 2500 or more amino acids in length. In certain embodiments, the heterologous non-arenaviral polypeptide does not exceed 500 amino acids in length. In certain embodiments, the heterologous non-arenaviral polypeptide does not exceed 750 amino acids in length. In certain embodiments, the heterologous non-arenaviral polypeptide does not exceed 1000 amino acids in length. In certain embodiments, the heterologous non-arenaviral polypeptide does not exceed 2500 amino acids in length.

[0235] In certain embodiments, the heterologous non-arenaviral polypeptide consists of about, at least about, or at most about 5, 8, 10, 12, 15, 18, 20, 22, 25, 28, 30, 32, 35, 38, 40, 42, 45, 48, 50, 52, 55, 58, 60, 65, 70, 75, 80, 85, 90, 95, 100, 150, 200, 250, 300, 350, 400, 450, 500, 550, 600, 650, 700, 750, 800, 850, 900, 950, or 1000 amino-acid residues. In certain embodiments, the heterologous non-arenaviral polypeptide may consist of about, at least about, or at most about 58 amino-acid residues. In certain embodiments, the heterologous non-arenaviral polypeptide may consist of about, at least about, or at most about 193 amino-acid residues. In certain embodiments, the heterologous non-arenaviral polypeptide may consist of about, at least about, or at most about 200 amino-acid residues. In certain embodiments, the heterologous non-arenaviral polypeptide may consist of about, at least about, or at most about 480 amino-acid residues. In certain embodiments, the heterologous non-arenaviral polypeptide may consist of about, at least about, or at most about 450 amino-acid residues. In certain embodiments, the heterologous non-arenaviral polypeptide may consist of about, at least about, or at most about 500 amino-acid residues. In certain embodiments, the heterologous non-arenaviral polypeptide may consist of about, at least about, or at most about 350 amino-acid residues. In certain embodiments, the heterologous non-arenaviral polypeptide may consist of about, at least about, or at most about 400 amino-acid residues. In certain embodiments, the heterologous non-arenaviral polypeptide may consist of about, at least about, or at most about 550 amino-acid residues. In certain embodiments, the heterologous non-arenaviral polypeptide may consist of about, at least about, or at most about 600 amino-acid residues. In certain embodiments, the heterologous non-arenaviral polypeptide may consist of about, at least about, or at most about 15 amino-acid residues. In certain embodiments, the heterologous non-arenaviral polypeptide may consist of about, at least about, or at most about 20 amino-acid residues. In certain embodiments, the heterologous non-arenaviral polypeptide may consist of about, at least about, or at most about 1 to 20 amino-acid residues. In certain embodiments, the heterologous non-arenaviral polypeptide may consist of about, at least about, or at most about 200 to 600 amino-acid residues.

[0236] In certain embodiments, the heterologous non-arenaviral polypeptide is a reporter protein (see Section 5.3.1). In certain embodiments, the heterologous non-arenaviral polypeptide is a heterologous non-arenaviral signal peptide (see Section 5.3.2). In certain embodiments, the heterologous non-arenaviral polypeptide is an antigen (see Section 5.3.3).

### 5.3.1 Reporter Protein

[0237] In certain embodiments, the heterologous non-arenaviral polypeptide described herein is a reporter protein or a fluorescent protein. In certain embodiments, the reporter protein is a fluorescent protein. In certain embodiments, the reporter protein is green fluorescent protein (GFP). GFP emits bright green light when exposed to UV or blue like. In other embodiments, the reporter protein is a red fluorescent protein (RFP). In an exemplary embodiments, the report protein is TOM.

[0238] Reporter protein and genes would be readily recognized by one of skill in the art. Non-limiting examples of reporter proteins include various enzymes, such as, but not to β-galactosidase, chloramphenicol acetyltransferase, neomycin phosphotransferase, luciferase or RFP.

[0239] In certain embodiments, the reporter protein is capable of expression at the same time as the antigen described herein. Ideally, expression is visible in normal light or other wavelengths of light. In certain embodiments, the intensity of the effect created by the reporter protein can be used to directly measure and monitor the arenavirus particle or tri-segmented arenavirus particle.

### 5.3.2 Heterologous Non-Arenaviral Signal Peptide

[0240] In certain embodiments, the heterologous non-arenaviral polypeptide described herein is a heterologous non-arenaviral signal peptide. In certain embodiments, the heterologous non-arenaviral signal peptide is a signal peptide of a glycoprotein. In certain embodiments, the heterologous non-arenaviral signal peptide is from a virus family selected from the group consisting of adenoviridae (e.g., mastadenovirus and aviadenovirus), herpesviridae (e.g., herpes simplex virus 1, herpes simplex virus 2, herpes simplex virus 5, herpes simplex virus 6, Epstein-Barr virus, HHV6-HHV8, cytomegalovirus, and varicella zoster virus), leviviridae (e.g., levivirus, enterobacteria phase MS2, allolevirus), orthomyxoviridae (e.g., influenzavirus A, influenzavirus B, influenzavirus C), parvoviridae (e.g., Parvovirus B19), filoviridae (e.g., Ebola virus, Marburg virus), hantaviridae, poxviridae (e.g., chordopoxviridae, parapoxvirus, avipoxvirus, capripoxvirus, leporiipoxvirus, suipoxvirus, molluscipoxvirus, and entomopoxyirinae), polyomaviridae, papillomaviridae (e.g., human papillomavirus), paramyxoviridae (e.g., paramyxovirus, parainfluenza virus 1, mobillivirus (e.g., measles virus), rubulavirus (e.g., mumps virus)), pneumoviridae (e.g., pneumovirus, human respiratory syncytial virus and metapneumovirus (e.g., avian pneumovirus and human metapneumovirus)), picornaviridae (e.g., enterovirus, rhinovirus, hepatovirus (e.g., human hepatitis A virus), cardiovirus, and apthovirus), reoviridae (e.g., orthoreovirus, orbivirus, rotavirus, cypovirus, fijivirus, phytoreovirus, and oryzavirus), retroviridae (e.g., mammalian type B retroviruses, mammalian type C retroviruses, avian type C retroviruses, type D retrovirus group, BLV-HTLV retroviruses, lentivirus (e.g. human immunodeficiency virus (HIV) 1 and HIV-2 (e.g., HIV gp160)), spumavirus), flaviviridae (e.g., hepatitis C virus, dengue virus, West Nile virus), hepadnaviridae (e.g., hepatitis B virus), togaviridae (e.g., alphavirus (e.g., sindbis virus) and rubivirus (e.g., rubella virus)), rhabdoviridae (e.g., vesiculovirus, lyssavirus, ephemerovirus, cytorhabdovirus, and necleorhabdovirus), arenaviridae (e.g., arenavirus, lymphocytic choriomeningitis virus, Ippy virus, mobala virus, mopeia virus, amapari virus, flexal virus, guanarito virus, junin virus, latino virus, machupo virus, oliveros virus, parana virus, pichinde virus, pirital virus, sabia virus, tacaribe virus, tamiami virus, bear canyon virus, whitewater arroyo virus, allpahuayo virus (ALLV), and lassa virus), and coronaviridae (e.g., coronavirus and torovirus). In certain embodiments, the heterologous non-arenaviral signal peptide is the signal peptide of the vesicular stomatitis virus serotype Indiana glycoprotein.

### 5.3.3 Antigen

[0241] In certain embodiments, the heterologous non-arenaviral polypeptide is an antigen. In certain embodiments, the antigen is derived from an infectious organism, tumor, or allergen. In one embodiment, the antigen is of an infectious pathogen or associated with any disease that is capable of eliciting an immune response. In certain embodiments, the heterologous non-arenaviral polypeptide is an antigen derived from a virus, a bacterium, a fungus, a parasite, or can be expressed in a tumor or tumor associated disease (i.e., cancer), an autoimmune disease, a degenerative disease, an inherited disease, substance dependency, obesity, or an allergic disease.

[0242] In certain embodiments, the heterologous non-arenaviral polypeptide is a viral antigen. Non-limiting examples of viral antigens include antigens from adenoviridae (e.g., mastadenovirus and aviadenovirus), herpesviridae (e.g., herpes simplex virus 1, herpes simplex virus 2, herpes simplex virus 5, herpes simplex virus 6, Epstein-Barr virus, HHV6-HHV8, cytomegalovirus, and varicella zoster virus), leviviridae (e.g., levivirus, enterobacteria phase MS2, allolevirus), orthomyxoviridae (e.g., influenzavirus A, influenzavirus B, influenzavirus C), parvoviridae (e.g., Parvovirus B19), filoviridae (e.g., Ebola virus, Marburg virus), hantaviridae, poxviridae (e.g., chordopoxviridae, parapoxvirus, avipoxvirus, capripoxvirus, leporiipoxvirus, suipoxvirus, molluscipoxvirus, and entomopoxyirinae), polyomaviridae, papillomaviridae (e.g., human papillomavirus), paramyxoviridae (e.g., paramyxovirus, parainfluenza virus 1, mobillivirus (e.g., measles virus), rubulavirus (e.g., mumps virus)), pneumoviridae (e.g., pneumovirus, human respiratory syncytial virus and metapneumovirus (e.g., avian pneumovirus and human metapneumovirus)), picornaviridae (e.g., enterovirus, rhinovirus, hepatovirus (e.g., human hepatitis A virus), cardiovirus, and apthovirus), reoviridae (e.g., orthoreovirus, orbivirus, rotavirus, cypovirus, fijivirus, phytoreovirus, and oryzavirus), retroviridae (e.g., mammalian type B retroviruses, mammalian type C retroviruses, avian type C retroviruses, type D retrovirus group, BLV-HTLV retroviruses, lentivirus (e.g. human immunodeficiency virus (HIV) 1 and HIV-2 (e.g., HIV gp160)), spumavirus), flaviviridae (e.g., hepatitis C virus, dengue virus, West Nile virus), hepadnaviridae (e.g., hepatitis B virus), togaviridae (e.g., alphavirus (e.g., sindbis virus) and rubivirus (e.g., rubella virus)), rhabdoviridae (e.g., vesiculovirus, lyssavirus, ephemerovirus, cytorhabdovirus, and necleorhabdovirus), arenaviridae (e.g., arenavirus, lymphocytic choriomeningitis virus, Ippy virus, mobala virus, mopeia virus, amapari virus, flexal virus, guanarito virus, junin virus, latino virus, machupo virus, oliveros virus, parana virus, pichinde virus, pirital virus, sabia virus, tacaribe virus, tamiami virus, bear canyon virus, whitewater arroyo virus, allpahuayo virus (ALLV), and lassa virus), and coronaviridae (e.g., coronavirus and torovirus). In certain embodiments, the arenavirus particle described herein comprises a genome encoding an antigen from a mammarenavirus (e.g., Allpahuayo virus, Alxa virus, Junin virus, Bear Canyon virus, Sabia virus, Pichinde virus, Chapare virus, Lijiang virus, Cupixi virus, Flexal virus, Gairo virus, Guanarito virus, Ippy virus, Lassa virus, Latino virus, Loei River virus, Lujo virus, Luna virus, Luli virus, Lunk virus, lymphocytic choriomeningitis virus, Machupo virus, Mariental virus, Merino Walk virus, Mobala virus, Mopeia virus, Morogoro virus, Okahandja virus, Oliveros virus, Parana virus, Pirital virus, Aporé virus, Ryukyu virus, Amapari virus, Solwezi virus, souris virus, Tacaribe virus, Tamiami virus, Wenzhou virus, Whitewater Arroyo virus, Big Brushy Tank virus, Catarina virus, Skinner Tank virus, Tonto Creek virus, or Xapuri virus), wherein the mammarenavirus is different from the species of arenavirus from which the arenavirus particle comprises GP, NP, Z as well as L. In a specific embodiment the viral antigen, is HIV gp120, gp41, HIV Nef, RSV F glycoprotein, RSV G glycoprotein, HTLV tax, herpes simplex virus glycoprotein (e.g., gB, gC, gD, and gE) or hepatitis B surface antigen, hepatitis C virus E protein or coronavirus spike protein. In one embodiment, the viral antigen is not an HIV antigen.

[0243] In other embodiments, the heterologous non-arenaviral polypeptide is a bacterial antigen (e.g., bacterial coat protein). Non-limiting examples of bacterial antigens include antigens from a bacteria family selected from the group consisting of the Aquaspirillum family, Azospirillum family, Azotobacteraceae family, Bacteroidaceae family, Bartonella species, Bdellovibrio family, Campylobacter species, Chlamydia species (e.g., Chlamydia pneumoniae), clostridium, Enterobacteriaceae family (e.g., Citrobacter species, Edwardsiella, Enterobacter aerogenes, Envinia species, Escherichia coli, Hafnia species, Klebsiella species, Morganella species, Proteus vulgaris, Providencia, Salmonella species, Serratia marcescens, and Shigella flexneri), Gardinella family, Haemophilus influenzae, Halobacteriaceae family, Helicobacter family, Legionallaceae family, Listeria species, Methylococcaceae family, mycobacteria (e.g., Mycobacterium tuberculosis), Neisseriaceae family, Oceanospirillum family, Pasteurellaceae family, Pneumococcus species, Pseudomonas species, Rhizobiaceae family, Spirillum family, Spirosomaceae family, Staphylococcus (e.g., methicillin resistant Staphylococcus aureus and Staphylococcus pyrogenes), Streptococcus (e.g., Streptococcus enteritidis, Streptococcus fasciae, and Streptococcus pneumoniae), Vampirovibr Helicobacter family, Yersinia family, Bacillus antracis and Vampirovibrio family.

[0244] In other embodiments, the heterologous non-arenaviral polypeptide is a parasitic antigen (e.g., a protozoan antigen). Non-limiting examples of parasite antigens include antigens from a parasite such as an amoeba, a malarial parasite, Plasmodium, Trypanosoma cruzi.

[0245] In yet other embodiments, the heterologous non-arenaviral polypeptide is a fungal antigen. Non-limiting examples of fungal antigens include antigens from fungus of Absidia species (e.g., Absidia corymbifera and Absidia ramosa), Aspergillus species, (e.g., Aspergillus flavus, Aspergillus fumigatus, Aspergillus nidulans, Aspergillus niger, and Aspergillus terreus), Basidiobolus ranarum, Blastomyces dermatitidis, Candida species (e.g., Candida albicans, Candida glabrata, Candida kern, Candida krusei, Candida parapsilosis, Candida pseudotropicalis, Candida quillermondii, Candida rugosa, Candida stellatoidea, and Candida tropicalis), Coccidioides immitis, Conidiobolus species, Cryptococcus neoforms, Cunninghamella species, dermatophytes, Histoplasma capsulatum, Microsporum gypseum, Mucor pusillus, Paracoccidioides brasiliensis, Pseudallescheria boydii, Rhinosporidium seeberi, Pneumocystis carinii, Rhizopus species (e.g., Rhizopus arrhizus, Rhizopus oryzae, and Rhizopus microsporus), Saccharomyces species, Sporothrix schenckii, zygomycetes, and classes such as Zygomycetes, Ascomycetes, the Basidiomycetes, Deuteromycetes, and Oomycetes.

[0246] In some embodiments, the heterologous non-arenaviral polypeptide is a tumor neoantigen. A “neoantigen,” used herein, means an antigen that arises by mutation in a tumor cell and such an antigen is not generally expressed in normal cells or tissue. Without being bound by theory, because healthy tissues generally do not possess these antigens, neoantigens represent a preferred target. Additionally, without being bound by theory, in the context of the present invention, since the T cells that recognize the neoantigen may not have undergone negative thymic selection or functionally impacted by peripheral tolerance mechanisms, such cells can have high functional avidity to the antigen and mount a strong immune response against tumors, while lacking the risk to induce destruction of normal tissue and autoimmune damage. In certain embodiments, the neoantigen is an MHC class I-restricted neoantigen. In certain embodiments, the neoantigen is an MHC class II-restricted neoantigen. In certain embodiments, a mutation in a tumor cell of the patient results in a novel protein that produces the neoantigen. In certain embodiments, the heterologous non-arenaviral polypeptide is a tumor neo-epitope. In certain embodiments, the neo-epitope is an MHC class I-restricted neo-epitope. In certain embodiments, the neo-epitope is an MHC class II-restricted neo-epitope.

[0247] In some embodiments, the heterologous non-arenaviral polypeptide is a tumor antigen or tumor associated antigen. In some embodiments, the tumor antigen or tumor associated antigen includes antigens from tumor associated diseases including acute lymphoblastic leukemia, acute myeloid leukemia, adrenocortical carcinoma, childhood adrenocortical carcinoma, AIDS-Related Cancers, Kaposi Sarcoma, anal cancer, appendix cancer, astrocytomas, atypical teratoid/rhabdoid tumor, basal-cell carcinoma, bile duct cancer, extrahepatic (see cholangiocarcinoma), bladder cancer, bone osteosarcoma/malignant fibrous histiocytoma, brainstem glioma, brain cancer, brain tumor, cerebellar astrocytoma, cerebral astrocytoma/malignant glioma brain tumor, ependymoma, medulloblastoma, supratentorial primitive neuroectodermal tumors, visual pathway and hypothalamic glioma, breast cancer, bronchial adenomas/carcinoids, burkitt's lymphoma, carcinoid tumor, carcinoid gastrointestinal tumor, carcinoma of unknown primary, central nervous system lymphoma, primary, cerebellar astrocytoma, cerebral astrocytoma/malignant glioma, cervical cancer, childhood cancers, chronic bronchitis, chronic lymphocytic leukemia, chronic myelogenous leukemia, chronic myeloproliferative disorders, colon cancer, cutaneous T-cell lymphoma, desmoplastic small round cell tumor, emphysema, endometrial cancer, ependymoma, esophageal cancer, ewing's sarcoma in the Ewing family of tumors, extracranial germ cell tumor, extragonadal germ cell tumor, extrahepatic bile duct cancer, intraocular melanoma, retinoblastoma, gallbladder cancer, gastric (stomach) cancer, gastrointestinal carcinoid tumor, gastrointestinal stromal tumor, germ cell tumor: extracranial, extragonadal, or ovarian gestational trophoblastic tumor, glioma of the brain stem, glioma, childhood cerebral astrocytoma, childhood visual pathway and hypothalamic, gastric carcinoid, hairy cell leukemia, head and neck cancer, heart cancer, hepatocellular (liver) cancer, hodgkin lymphoma, hypopharyngeal cancer, hypothalamic and visual pathway glioma, intraocular melanoma, islet cell carcinoma (endocrine pancreas), kaposi sarcoma, kidney cancer (renal cell cancer), laryngeal cancer, acute lymphoblastic lymphoma, acute lymphocytic leukemia, acute myelogenous leukemia, chronic lymphocytic leukemia, chronic myeloid leukemia, lip and oral cavity cancer, liposarcoma, liver cancer (primary), lung cancer, non-small cell, small cell, AIDS-related lymphoma, Burkitt lymphoma, cutaneous T-cell lymphoma, hodgkin lymphoma, non-hodgkin lymphoma, lymphoma, primary central nervous system, macroglobulinemia, Waldenström, male breast cancer, malignant fibrous histiocytoma of bone/osteosarcoma, medulloblastoma, melanoma, intraocular (eye), merkel cell cancer, mesothelioma, adult malignant, mesothelioma, metastatic squamous neck cancer with occult primary, mouth cancer, multiple endocrine neoplasia syndrome, multiple myeloma/plasma cell neoplasm, mycosis fungoides, myelodysplastic syndromes, myelodysplastic/myeloproliferative diseases, myelogenous leukemia, chronic, myeloid leukemia, adult acute, myeloid leukemia, childhood acute, myeloma, multiple (cancer of the bone-marrow), myeloproliferative disorders, chronic, nasal cavity and paranasal sinus cancer, nasopharyngeal carcinoma, neuroblastoma, non-small cell lung cancer, oligodendroglioma, oral cancer, oropharyngeal cancer, osteosarcoma/malignant fibrous histiocytoma of bone, ovarian cancer, ovarian epithelial cancer (surface epithelial-stromal tumor), ovarian germ cell tumor, ovarian low malignant potential tumor, pancreatic cancer, islet cell, paranasal sinus and nasal cavity cancer, parathyroid cancer, penile cancer, pharyngeal cancer, pheochromocytoma, pineal astrocytoma, pineal germinoma, pineoblastoma and supratentorial primitive neuroectodermal tumors, pituitary adenoma, plasma cell neoplasia/multiple myeloma, pleuropulmonary blastoma, primary central nervous system lymphoma, prostate cancer, rectal cancer, renal cell carcinoma (kidney cancer), renal pelvis and ureter, transitional cell cancer, retinoblastoma, rhabdomyosarcoma, childhood, salivary gland cancer, sarcoma, Ewing family of tumors, Kaposi sarcoma, soft tissue sarcoma, uterine sarcoma, sezary syndrome, skin cancer (non-melanoma), skin cancer (melanoma), merkel cell skin carcinoma, small cell lung cancer, small intestine cancer, soft tissue sarcoma, squamous cell carcinoma—see skin cancer (non-melanoma), squamous neck cancer with occult primary, metastatic, stomach cancer, supratentorial primitive neuroectodermal tumor, T-Cell lymphoma, cutaneous—see Mycosis Fungoides and Sezary syndrome, testicular cancer, throat cancer, thymoma and thymic carcinoma, thyroid cancer, childhood transitional cell cancer of the renal pelvis and ureter, gestational trophoblastic tumor, unknown primary site, carcinoma of, adult unknown primary site, cancer of childhood, ureter and renal pelvis, transitional cell cancer, rethral cancer, uterine cancer, endometrial uterine sarcoma, bronchial tumor, central nervous system embryonal tumor; childhood chordoma, colorectal cancer, craniopharyngioma, ependymoblastoma, langerhans cell histiocytosis, acute lymphoblastic leukemia, acute myeloid leukemia (adult/childhood), small cell lung cancer, medulloepithelioma, oral cavity cancer, papillomatosis, pineal parenchymal tumors of intermediate differentiation, pituary tumor, respiratory tract carcinoma involving the NUT gene on chromosome 15, spinal cord tumor, thymoma, thyroid cancer, vaginal cancer; vulvar cancer, and Wilms tumor.

[0248] Non-limiting examples of tumor or tumor associated antigens include Adipophilin, AIM-2, ALDH1A1, BCLX (L), BING-4, CALCA, CD45, CPSF, cyclin D1, DKK1, ENAH (hMena), EpCAM, EphA3, EZH2, FGF5, glypican-3, G250/MN/CAIX, HER-2/neu, IDO1, IGF2B3, IL 13Ralpha2, Intestinal carboxyl esterase, alpha-fetoprotein, Kallikrein 4, KIF20A, Lengsin, M-CSF, MCSP, mdm-2, Meloe, MMP-2, MMP-7, MUC1, MUC5AC, p53, PAX5, PBF, PRAME, PSMA, RAGE-1, RGS5, RhoC, RNF43, RU2AS, secernin 1, SOX10, STEAP1, survivinn, Telomerase, VEGF, or WT1, EGF-R, CEA, CD52, gp 100 protein, MELANA/MART1, NY-ESO-1, p53, MAGE1, MAGE3 and CDK4, alpha-actinin-4, ARTC1, BCR-ABL fusion protein (b3a2), B-RAF, CASP-5, CASP-8, beta-catenin, Cdc27, CDK4, CDKN2A, CLPP, COA-1, dek-can fusion protein, EFTUD2, Elongation factor 2, ETV6-AML1 fusion protein, FLT3-ITD, FN1, GPNMB, LDLR-fucosyltransferaseAS fusion protein, NFYC, OGT, OS-9, pml-RARalpha fusion protein, PRDX5, PTPRK, K-ras, N-ras, RBAF600, SIRT2, SNRPD1, SYT-SSX1 or -SSX2 fusion protein, TGF-betaRII, Triosephosphate isomerase, Lengsin, M-CSF, MCSP, or mdm-2.

[0249] In some embodiments, the heterologous non-arenaviral polypeptide is a respiratory pathogen antigen. In a specific embodiment, the respiratory pathogen is a virus such as RSV, coronavirus, human metapneumovirus, parainfluenza virus, hendra virus, nipah virus, adenovirus, rhinovirus, or PRRSV. Non-limiting examples of respiratory viral antigens include Respiratory Syncytial virus F, G and M2 proteins, Coronavirus (SARS, HuCoV) spike proteins (S), human metapneumovirus fusion proteins, Parainfluenza virus fusion and hemagglutinin proteins (F, HN), Hendra virus (HeV) and Nipah virus (NiV) attachment glycoproteins (G and F), Adenovirus capsid proteins, Rhinovirus proteins, and PRRSV wild type or modified GP5 and M proteins.

[0250] In a specific embodiment, the respiratory pathogen is a bacteria such as Bacillus anthracis, Mycobacterium tuberculosis, Bordetella pertussis, Streptococcus pneumoniae, Yersinia pestis, Staphylococcus aureus, Francisella tularensis, Legionella pneumophila, Chlamydia pneumoniae, Pseudomonas aeruginosa, Neisseria meningitides, and Haemophilus influenzae. Non-limiting examples of respiratory bacterial antigens include Bacillus anthracis Protective antigen PA, Mycobacterium tuberculosis mycobacterial antigen 85A and heat shock protein (Hsp65), Bordetella pertussis pertussis toxoid (PT) and filamentous hemagglutinin (FHA), Streptococcus pneumoniae sortase A and surface adhesin A (PsaA), Yersinia pestis F1 and V subunits, and proteins from Staphylococcus aureus, Francisella tularensis, Legionella pneumophila, Chlamydia pneumoniae, Pseudomonas aeruginosa, Neisseria meningitides, and Haemophilus influenzae.

[0251] In some embodiments, the heterologous non-arenaviral polypeptide is a T-cell epitope. In other embodiments, the heterologous ORF encodes a cytokine or growth factor.

[0252] In other embodiments, the heterologous non-arenaviral polypeptide is an antigen expressed in an autoimmune disease. In more specific embodiments, the autoimmune disease can be type I diabetes, multiple sclerosis, rheumatoid arthritis, lupus erythmatosus, and psoriasis. Non-limiting examples of autoimmune disease antigens include Ro60, dsDNA, or RNP.

[0253] In other embodiments, the heterologous non-arenaviral polypeptide is an antigen expressed in an allergic disease. In more specific embodiments, the allergic disease can include but is not limited to seasonal and perennial rhinoconjunctivitis, asthma, and eczema. Non-limiting examples of allergy antigens include Bet v 1 and Fel d 1.

### 5.4 Nucleotide Sequence Provided Herein

[0254] In one aspect, provided herein are nucleotide sequences. In certain embodiments, provided herein is a nucleotide sequence comprising a first open reading frame (ORF) and a second ORF, wherein one of the two ORFs is in sense orientation and the other ORF is in antisense orientation;

wherein the first ORF comprises a nucleotide sequence encoding a functional fragment of a first polypeptide, and the first ORF does not encode the full-length first polypeptide;
wherein the second ORF comprises a nucleotide sequence encoding:
[0255] a) a second polypeptide; or
[0256] b) a functional fragment of the first polypeptide, and the second ORF does not encode the full-length first polypeptide; or
[0257] c) a functional fragment of a second polypeptide, and the second ORF does not encode the full-length second polypeptide; or
[0258] d) a heterologous non-arenaviral polypeptide; and
   wherein the first and second polypeptides are different from each other and selected from the group consisting of arenavirus GP, NP, Z and L.

[0259] In certain embodiments, the first ORF and the second ORF are separated by an arenavirus intergenic region (IGR) and each ORF is under control of an arenavirus 3′ untranslated region (UTR) or an arenavirus 5′ UTR.

[0260] In certain embodiments, the first ORF further comprises a nucleotide sequence encoding a second heterologous non-arenaviral polypeptide or a third polypeptide; wherein the third polypeptide is different from the first polypeptide and second polypeptide and is selected from the group consisting of arenavirus GP, NP, Z and L; and wherein the heterologous non-arenaviral polypeptide and the second heterologous non-arenaviral polypeptide are the same or different from each other.

[0261] In certain embodiments, the second ORF further comprises a nucleotide sequence encoding a second heterologous non-arenaviral polypeptide or a third polypeptide; wherein the third polypeptide is different from the first polypeptide and second polypeptide and is selected from the group consisting of arenavirus GP, NP, Z and L; and wherein the heterologous non-arenaviral polypeptide and the second heterologous non-arenaviral polypeptide are the same or different from each other.

[0262] In certain embodiments, the first ORF is part of a transcription unit that further comprises another ORF, wherein the other ORF and the first ORF are separated by an internal ribosome entry site (IRES). In certain embodiments, the second ORF is part of a transcription unit that further comprises another ORF, wherein the other ORF and the second ORF are separated by an IRES. In certain embodiments, the first ORF and/or the second ORF comprises a nucleotide sequence encoding an arenavirus GP signal peptide or a functional fragment thereof and the other ORF comprises a nucleotide sequence encoding a heterologous non-arenaviral polypeptide or an arenavirus NP, Z, or L.

[0263] In certain embodiments, the arenavirus GP, NP, Z and L are from LCMV, Lassa virus, Pichinde virus, Oliveros virus, Tamiami virus, Mobala virus, Mopeia virus, Ippy virus, Amapari virus, Flexal virus, Guanarito virus, Latino virus, Machupo virus, Parana virus, Pirital virus, Sabia virus, Tacaribe virus, Bear Canyon virus, Whitewater Arroyo virus, Allpahuayo virus (ALLV), Alxa virus, Chapare virus, Lijiang virus, Cupixi virus, Gairo virus, Loei River virus, Lujo virus, Luna virus, Luli virus, Lunk virus, Mariental virus, Merino Walk virus, Morogoro virus, Okahandja virus, Aporé virus, Ryukyu virus, Solwezi virus, souris virus, Wenzhou virus, Big Brushy Tank virus, Catarina virus, Skinner Tank virus, Tonto Creek virus, Xapuri virus, or Junin virus.

[0264] In certain embodiments, provided herein is a nucleotide sequence comprising an open reading frame (ORF), wherein the ORF comprises a nucleotide sequence encoding
[0265] a) a functional fragment of a first polypeptide, and
[0266] b) a heterologous non-arenaviral polypeptide or a second polypeptide;
   wherein the ORF does not encode the full-length first polypeptide; and wherein the first and second polypeptides are different from each other and selected from the group consisting of arenavirus GP, NP, Z and L that are not from Lassa virus. In certain embodiments, the first and second polypeptides are selected from the group consisting of arenavirus GP, NP, Z and L of LCMV, Pichinde virus, Oliveros virus, Tamiami virus, Mobala virus, Mopeia virus, Ippy virus, Amapari virus, Flexal virus, Guanarito virus, Latino virus, Machupo virus, Parana virus, Pirital virus, Sabia virus, Tacaribe virus, Bear Canyon virus, Whitewater Arroyo virus, Allpahuayo virus (ALLV), Alxa virus, Chapare virus, Lijiang virus, Cupixi virus, Gairo virus, Loei River virus, Lujo virus, Luna virus, Luli virus, Lunk virus, Mariental virus, Merino Walk virus, Morogoro virus, Okahandja virus, Aporé virus, Ryukyu virus, Solwezi virus, souris virus, Wenzhou virus, Big Brushy Tank virus, Catarina virus, Skinner Tank virus, Tonto Creek virus, Xapuri virus, or Junin virus.

[0267] In certain embodiments, the ORF is a first ORF and the nucleotide sequence further comprises a second ORF. In certain embodiments, the second ORF comprises a nucleotide sequence encoding a third polypeptide, a functional fragment of the first polypeptide, a functional fragment of a third polypeptide, or a second heterologous non-arenaviral polypeptide; wherein the third polypeptide is different from the first polypeptide and the second polypeptide and selected from the group consisting of arenavirus GP, NP, Z and L; wherein one of the two ORFs is in sense orientation and the other ORF is in antisense orientation; wherein the second ORF does not encode the full-length first polypeptide; wherein the second ORF does not encode the full-length third polypeptide; and wherein the heterologous non-arenaviral polypeptide and the second heterologous non-arenaviral polypeptide are the same or different from each other. In certain embodiments, the second ORF comprises a nucleotide sequence encoding a functional fragment of a first polypeptide, and wherein the functional fragment encoded by the first ORF is different from the functional fragment encoded by the second ORF.

[0268] In certain embodiments, the nucleotide sequence does not further comprise a second ORF.

[0269] In certain embodiments, the nucleotide sequence is an arenavirus genomic or antigenomic S segment. In certain embodiments, the nucleotide sequence is an arenavirus genomic or antigenomic L segment.

[0270] In certain embodiments, the first ORF is under control of an arenavirus 3′ UTR, and the second ORF is under control of an arenavirus 5′ UTR. In certain embodiments, the first ORF is under control of an arenavirus 5′ UTR, and the second ORF is under control of an arenavirus 3′ UTR.

[0271] In certain embodiments, the first ORF comprises a nucleotide sequence encoding arenavirus GP signal peptide, either alone or fused to a heterologous non-arenaviral polypeptide. In certain embodiments, the second ORF comprises a nucleotide sequence encoding a heterologous non-arenaviral signal peptide and the arenavirus GP1 and GP2. In certain embodiments, the second ORF comprises a nucleotide sequence encoding a heterologous non-arenaviral polypeptide; wherein the heterologous non-arenaviral polypeptide encoded by the first ORF and the heterologous non-arenaviral polypeptide encoded by the second ORF are the same or different from each other. In certain embodiments, the first ORF is under control of an arenavirus 3′ UTR and the second ORF is under control of an arenavirus 5′ UTR.

[0272] In certain embodiments, the first ORF comprises a nucleotide sequence encoding a heterologous non-arenaviral signal peptide and the arenavirus GP1 and GP2. In certain embodiments, the second ORF comprises a nucleotide sequence encoding NP. In certain embodiments, the first ORF is under control of an arenavirus 5′ UTR and the second ORF is under control of an arenavirus 3′ UTR.

[0273] In certain embodiments, the first polypeptide comprises an amino acid sequence that is at least 80%, 85%, 90%, 95%, 96%, 97%, 98%, 99% or 100% identical to the amino acid sequence of SEQ ID NO:1, SEQ ID NO:2, SEQ ID NO:3, SEQ ID NO:4, SEQ ID NO:5, SEQ ID NO:6, SEQ ID NO:7, SEQ ID NO:8, SEQ ID NO:9, SEQ ID NO:10, SEQ ID NO: 11, SEQ ID NO:12, SEQ ID NO:13, SEQ ID NO:14, SEQ ID NO:15, SEQ ID NO:16, SEQ ID NO:17, SEQ ID NO:18, SEQ ID NO:19, SEQ ID NO:20, SEQ ID NO:21, SEQ ID NO:22, SEQ ID NO:23, SEQ ID NO:24, SEQ ID NO:48, SEQ ID NO:52, SEQ ID NO:59, SEQ ID NO:66, SEQ ID NO:73, SEQ ID NO:80, SEQ ID NO:84, SEQ ID NO:91, SEQ ID NO:98, SEQ ID NO:105, SEQ ID NO:109, SEQ ID NO:113, SEQ ID NO:120, SEQ ID NO:127, SEQ ID NO:134, SEQ ID NO:49, SEQ ID NO:56, SEQ ID NO:63, SEQ ID NO:70, SEQ ID NO:77, SEQ ID NO:81, SEQ ID NO:88, SEQ ID NO:95, SEQ ID NO:102, SEQ ID NO:106, SEQ ID NO:110, SEQ ID NO:117, SEQ ID NO:124, SEQ ID NO:131, SEQ ID NO:138, SEQ ID NO:50, SEQ ID NO:57, SEQ ID NO:64, SEQ ID NO:71, SEQ ID NO:78, SEQ ID NO:82, SEQ ID NO:89, SEQ ID NO:96, SEQ ID NO:103, SEQ ID NO:107, SEQ ID NO:111, SEQ ID NO: 118, SEQ ID NO:125, SEQ ID NO:132, SEQ ID NO:139, SEQ ID NO:51, SEQ ID NO:58, SEQ ID NO:65, SEQ ID NO:72, SEQ ID NO:79, SEQ ID NO:83, SEQ ID NO:90, SEQ ID NO:97, SEQ ID NO:104, SEQ ID NO:108, SEQ ID NO:112, SEQ ID NO:119, SEQ ID NO:126, SEQ ID NO:133, or SEQ ID NO:140; and the second polypeptide comprises an amino acid sequence that is at least 80%, 85%, 90%, 95%, 96%, 97%, 98%, 99% or 100% identical to the amino acid sequence of SEQ ID NO:1, SEQ ID NO:2, SEQ ID NO:3, SEQ ID NO:4, SEQ ID NO:5, SEQ ID NO:6, SEQ ID NO:7, SEQ ID NO:8, SEQ ID NO:9, SEQ ID NO:10, SEQ ID NO:11, SEQ ID NO:12, SEQ ID NO:13, SEQ ID NO:14, SEQ ID NO:15, SEQ ID NO:16, SEQ ID NO:17, SEQ ID NO:18, SEQ ID NO:19, SEQ ID NO:20, SEQ ID NO:21, SEQ ID NO:22, SEQ ID NO:23, SEQ ID NO:24, SEQ ID NO:48, SEQ ID NO:52, SEQ ID NO:59, SEQ ID NO:66, SEQ ID NO:73, SEQ ID NO:80, SEQ ID NO:84, SEQ ID NO:91, SEQ ID NO:98, SEQ ID NO:105, SEQ ID NO:109, SEQ ID NO:113, SEQ ID NO:120, SEQ ID NO:127, SEQ ID NO:134, SEQ ID NO:49, SEQ ID NO:56, SEQ ID NO:63, SEQ ID NO:70, SEQ ID NO:77, SEQ ID NO:81, SEQ ID NO:88, SEQ ID NO:95, SEQ ID NO:102, SEQ ID NO:106, SEQ ID NO:110, SEQ ID NO: 117, SEQ ID NO:124, SEQ ID NO:131, SEQ ID NO:138, SEQ ID NO:50, SEQ ID NO:57, SEQ ID NO:64, SEQ ID NO:71, SEQ ID NO:78, SEQ ID NO:82, SEQ ID NO:89, SEQ ID NO:96, SEQ ID NO:103, SEQ ID NO:107, SEQ ID NO:111, SEQ ID NO: 118, SEQ ID NO:125, SEQ ID NO:132, SEQ ID NO:139, SEQ ID NO:51, SEQ ID NO:58, SEQ ID NO:65, SEQ ID NO:72, SEQ ID NO:79, SEQ ID NO:83, SEQ ID NO:90, SEQ ID NO:97, SEQ ID NO:104, SEQ ID NO:108, SEQ ID NO: 112, SEQ ID NO: 119, SEQ ID NO:126, SEQ ID NO:133, or SEQ ID NO:140; and wherein the third polypeptide comprises an amino acid sequence that is at least 80%, 85%, 90%, 95%, 96%, 97%, 98%, 99% or 100% identical to the amino acid sequence of SEQ ID NO:1, SEQ ID NO:2, SEQ ID NO:3, SEQ ID NO:4, SEQ ID NO:5, SEQ ID NO:6, SEQ ID NO:7, SEQ ID NO:8, SEQ ID NO:9, SEQ ID NO:10, SEQ ID NO: 11, SEQ ID NO:12, SEQ ID NO:13, SEQ ID NO:14, SEQ ID NO:15, SEQ ID NO:16, SEQ ID NO:17, SEQ ID NO:18, SEQ ID NO:19, SEQ ID NO:20, SEQ ID NO:21, SEQ ID NO:22, SEQ ID NO:23, SEQ ID NO:24, SEQ ID NO:48, SEQ ID NO:52, SEQ ID NO:59, SEQ ID NO:66, SEQ ID NO:73, SEQ ID NO:80, SEQ ID NO:84, SEQ ID NO:91, SEQ ID NO:98, SEQ ID NO:105, SEQ ID NO:109, SEQ ID NO:113, SEQ ID NO:120, SEQ ID NO:127, SEQ ID NO:134, SEQ ID NO:49, SEQ ID NO:56, SEQ ID NO:63, SEQ ID NO:70, SEQ ID NO:77, SEQ ID NO:81, SEQ ID NO:88, SEQ ID NO:95, SEQ ID NO:102, SEQ ID NO:106, SEQ ID NO:110, SEQ ID NO:117, SEQ ID NO:124, SEQ ID NO:131, SEQ ID NO:138, SEQ ID NO:50, SEQ ID NO:57, SEQ ID NO:64, SEQ ID NO:71, SEQ ID NO:78, SEQ ID NO:82, SEQ ID NO:89, SEQ ID NO:96, SEQ ID NO:103, SEQ ID NO:107, SEQ ID NO:111, SEQ ID NO: 118, SEQ ID NO:125, SEQ ID NO:132, SEQ ID NO:139, SEQ ID NO:51, SEQ ID NO:58, SEQ ID NO:65, SEQ ID NO:72, SEQ ID NO:79, SEQ ID NO:83, SEQ ID NO:90, SEQ ID NO:97, SEQ ID NO:104, SEQ ID NO:108, SEQ ID NO:112, SEQ ID NO:119, SEQ ID NO:126, SEQ ID NO:133, or SEQ ID NO:140. In certain embodiments, the first polypeptide comprises an amino acid sequence identical to SEQ ID NO:1, SEQ ID NO:2, SEQ ID NO:3, SEQ ID NO:4, SEQ ID NO:5, SEQ ID NO:6, SEQ ID NO:48, SEQ ID NO:52, SEQ ID NO:59, SEQ ID NO:66, SEQ ID NO:73, SEQ ID NO:80, SEQ ID NO:84, SEQ ID NO:91, SEQ ID NO:98, SEQ ID NO:105, SEQ ID NO:109, SEQ ID NO:113, SEQ ID NO:120, SEQ ID NO:127, or SEQ ID NO:134.

[0274] In certain embodiments, the functional fragment of the first polypeptide comprises an amino acid sequence that is at least 80%, 85%, 90%, 95%, 96%, 97%, 98%, 99% or 100% identical to the amino acid sequence of SEQ ID NO:25, SEQ ID NO:26, SEQ ID NO:27, SEQ ID NO:28, SEQ ID NO:29, SEQ ID NO:30, SEQ ID NO:31, SEQ ID NO:32, SEQ ID NO:33, SEQ ID NO:142, SEQ ID NO:34, SEQ ID NO:35, SEQ ID NO:36, SEQ ID NO:37, SEQ ID NO:38, SEQ ID NO:39, SEQ ID NO:40, SEQ ID NO:41, SEQ ID NO:42, SEQ ID NO:53, SEQ ID NO:60, SEQ ID NO:67, SEQ ID NO:74, SEQ ID NO:85, SEQ ID NO:92, SEQ ID NO:99, SEQ ID NO: 114, SEQ ID NO:121, SEQ ID NO:128, SEQ ID NO:135, SEQ ID NO:54, SEQ ID NO:61, SEQ ID NO:68, SEQ ID NO:75, SEQ ID NO:86, SEQ ID NO:93, SEQ ID NO:100, SEQ ID NO: 115, SEQ ID NO:122, SEQ ID NO:129, SEQ ID NO:136, SEQ ID NO:55, SEQ ID NO:62, SEQ ID NO:69, SEQ ID NO:76, SEQ ID NO:87, SEQ ID NO:94, SEQ ID NO:101, SEQ ID NO: 116, SEQ ID NO:123, SEQ ID NO:130, or SEQ ID NO:137.

[0275] In certain embodiments, the functional fragment encoded by the first ORF or the second ORF is an arenavirus GP signal peptide or a functional fragment thereof.

[0276] In certain embodiments, the heterologous non-arenaviral polypeptide, the second heterologous non-arenaviral polypeptide, or both heterologous non-arenaviral polypeptides are each an antigen derived from an infectious organism, tumor, or allergen. In certain embodiments, the antigen is selected from the group consisting of
[0277] (a) viral antigens, and the viral antigen is from a virus family selected from the group consisting of adenoviridae, herpesviridae, leviviridae, orthomyxoviridae, parvoviridae, filoviridae, hantaviridae, poxviridae, papillomaviridae, polyomaviridae, paramyxoviridae, pneumoviridae, picornaviridae, reoviridae, retroviridae, flaviviridae, hepadnaviridae, togaviridae, rhabdoviridae, arenaviridae, and coronaviridae;
[0278] (b) bacterial antigens, and the bacterial antigen is from a bacteria family selected from the group consisting of Aquaspirillum family, Azospirillum family, Azotobacteraceae family, Bacteroidaceae family, Bartonellaceae family, Bdellovibrio family, Campylobacteraceae family, Chlamydiaceae family, Clostridiaceae family, Enterobacteriaceae family, Gardinella family, Pasteurellaceae family, Halobacteriaceae family, Helicobacter family, Legionallaceae family, Listeriaceae family, Methylococcaceae family, mycobacteriaceae, Neisseriaceae family, Oceanospirillum family, Pasteurellaceae family, Streptococcaceae family, Pseudomonadaceae family, Rhizobiaceae family, Spirillum family, Spirosomaceae family, Staphylococcaceae family, Helicobacter family, Yersinia family, Bacillus antracis and Vampirovibrio family, and
[0279] (c) tumor neoantigens or neo-epitopes and tumor associated antigens; and the tumor associated antigen is selected from the group consisting of artificial fusion protein of HPV 16 E7 and E6 proteins, oncogenic viral antigens, cancer-testis antigens, oncofetal antigens, tissue differentiation antigens, mutant protein antigens, Adipophilin, AIM-2, ALDHIAI, BCLX (L), BING-4, CALCA, CD45, CPSF, cyclin DI, DKKI, ENAH (hMcna), Ga733 (EpCAM), EphA3, EZH2, FGF5, glypican-3, G250/MN/CAIX, HER-2/neu, IDOI, IGF2B3, IL13Ralpha2, Intestinal carboxyl esterase, alphafoetoprotein, Kallikrein 4, KIF20A, Lengsin, M-CSF, MCSP, mdm-2, Meloe, MMP-2, MMP-7, MUCl, MUC5AC, p53 (non-mutant), PAX5, PBF, PRAME, PSMA, RAGE, RAGE-I, RGS5, RhoC, RNF43, RU2AS, secernin 1, SOX10, STEAPI (six-transmembrane epithelial antigen of the prostate 1), survivin, Telomerase, VEGF, WT1, EGF-R, CEA, CD20, CD33, CD52, MELANA/MART1, MART2, NY-ESO-1, p53, MAGE Al, MAGE A3, MAGE-4, MAGE-5, MAGE-6, CDK4, alpha-actinin-4, ARTC1, BCR-ABL, BCR-ABL fusion protein (b3a2), B-RAF, CASP-5, CASP-8, beta-catenin, Cdc27, CDK4, CDKN2A, CLPP, COA-1, dek-can fusion protein, EFTUD2, Elongation factor 2, ETV6-AML, ETV6-AML1 fusion protein, FLT3-ITD, FNl, GPNMB, LDLR-fucosyltransferase fusion protein, NFYC, OGT, OS-9, pml-RARalpha fusion protein, PRDX5, PTPRK, H-ras, K-ras (V-Ki-ras2 Kirsten rat sarcoma viral oncogene), N-ras, RBAF600, SIRT2, SNRPDl, SSX, SSX2, SYT-SSX1 or -SSX2 fusion protein, TGFbetaRII, Triosephosphate isomerase, ormdm-2, LMP2, HPV E6, HPV E7, EGFRvIII (epidermal growth factor variant III), Idiotype, GD2, ganglioside G2), Ras-mutant, p53 (mutant), Proteinase3 (PRI), Tyrosinase, PSA, hTERT, Sarcoma translocation breakpoints, EphA2, prostatic acid phosphatase PAP, neo-PAP, ML-IAP, AFP, ERG (TMPRSS2 ETS Fusion gene), NAI 7, PAX3, ALK, Androgen Receptor, Cyclin B1, Polysialic acid, MYCN, TRP2, TRP2-Int2, GD3, Fucosyl GMI, Mesothelin, PSCA, sLe(a), cyp1B1, PLACI, GM3, BORIS, Tn, GLoboH, NY-BR-I, SART3, STn, Carbonic Anhydrase IX, OY-TESI, Sperm protein 17, LCK, high molecular weight melanoma-associated antigen (HMWMAA), AKAP-4, SSX2, XAGE 1, B7H3, Legumain, Tie 2, Page4, VEGFR2, MAD-CT-I, FAP, PDGFR-beta, MADCT-2, For-related antigen 1, TRPI, GP100, CA-125, CA19-9, Calretinin, Epithelial membrane antigen (EMA), Epithelial tumor antigen (ETA), CD19, CD34, CD99, CDI 17, Chromogranin, Cytokeratin, Desmin, Glial fibrillary acidic protein (GFAP), gross cystic disease fluid protein (GCDFP-15), HMB-45 antigen, Myo-D1, muscle-specific actin (MSA), neurofilament, neuronspecific enolase (NSE), placental alkaline phosphatase, synaptophysis, thyroglobulin, thyroid transcription factor-1, dimeric form of the pyruvate kinase isoenzyme type M2 (tumor M2-PK), BAGE BAGE-1, CAGE, CTAGE, FATE, GAGE, GAGE-I, GAGE-2, GAGE-3, GAGE-4, GAGE-5, GAGE-6, GAGE-7, HCA661, HOM-TES-85, MAGEA, MAGEB, MAGEC, NA88, NY-SAR-35, SPANXBI, SPAI 7, SSX, SYCP1, TPTE, Carbohydrate/ganglioside GM2 (oncofetal antigen-immunogenic-1 OFA-I-1), GM3, CA 15-3 (CA 27.29\BCAA), CA 195, CA 242, CA 50, CAM 43, CEA, EBNA, EF2, Epstein-Barr virus antigen, HLA-A2, HLA-Al 1, HSP70-2, KIAAO205, MUM-I, MUM-2, MUM-3, Myosin class I, GnTV, Herv-K-mel, LAGE-I, LAGE-2, (sperm protein) SPI 7, SCP-I, P15(58), Hom/Mel-40, E2A-PRL, H4-RET, IGH-IGK, MYL-RAR, TSP-180, P185erbB2, p180erbB-3, c-met, nm-23H1, TAG-72, TAG-72-4, CA-72-4, CAM 17.1, NuMa, 13-catenin, P16, TAGE, CT7, 43-9F, 5T4, 791Tgp72, 13HCG, BCA225, BTAA, CD68\KP1, CO-029, HTgp-175, M344, MG7-Ag, MOV18, NB\70K, NYCO-1, RCAS1, SDCCAG16, TA-90, TAAL6, TLP, TPS, CD22, CD27, CD30, CD70, prostein, TARP (T cell receptor gamma alternate reading frame protein), Trp-p8, integrin avβ3 (CD61), galactin, or Ral-B, CD123, CLL-1, CD38, CS-1, CD138, and ROR1.

[0280] In certain embodiments, the heterologous non-arenaviral polypeptide or the second heterologous non-arenaviral polypeptide is expressed under control of an arenavirus 3′ UTR; and the expression level of the heterologous non-arenaviral polypeptide or the expression level of the second heterologous non-arenaviral polypeptide is at least about 1%, 2%, 3%, 4%, 5%, 6%, 7%, 8%, 9%, 10%, 15%, 20%, 30%, 40%, 50%, 60%, 70%, 80%, 90%, 100%, 1.5-fold, 2-fold, 3-fold, 4-fold, 5-fold, 6-fold, 7-fold, 8-fold, 9-fold, 10-fold, 12-fold, 15-fold, 18-fold, 20-fold, 25-fold, or 30-fold higher than the expression level of the same heterologous non-arenaviral polypeptide expressed under control of the respective arenavirus 5′ UTR or higher than the expression level of the same second heterologous non-arenaviral polypeptide expressed under control of the respective arenavirus 5′ UTR.

[0281] In certain embodiments, one heterologous non-arenaviral polypeptide is expressed under control of an arenavirus 3′ UTR and the other heterologous non-arenaviral polypeptide is expressed under control of an arenavirus 5′ UTR. In certain embodiments, the combined expression level of both the heterologous non-arenaviral polypeptides is at least about 1%, 2%, 3%, 4%, 5%, 6%, 7%, 8%, 9%, 10%, 15%, 20%, 30%, 40%, 50%, 60%, 70%, 80%, 90%, 100%, 1.5-fold, 2-fold, 3-fold, 4-fold, 5-fold, 6-fold, 7-fold, 8-fold, 9-fold, 10-fold, 12-fold, 15-fold, 18-fold, 20-fold, 25-fold, or 30-fold higher than the combined expression level of both the heterologous non-arenaviral polypeptides expressed under control of arenavirus 5′ UTRs.

[0282] In certain embodiments, one heterologous non-arenaviral polypeptide is expressed under control of an arenavirus 3′ UTR and the other heterologous non-arenaviral polypeptide is expressed under control of an arenavirus 5′ UTR. In certain embodiments, the heterologous non-arenaviral polypeptide is expressed under control of an arenavirus 3′ UTR and the second heterologous non-arenaviral polypeptide is expressed under control of an arenavirus 5′ UTR. In certain embodiments, the heterologous non-arenaviral polypeptide is expressed under control of an arenavirus 5′ UTR and the second heterologous non-arenaviral polypeptide is expressed under control of an arenavirus 3′ UTR. In certain embodiments, the combined expression level of both the heterologous non-arenaviral polypeptide and the second heterologous non-arenaviral polypeptide is at least about 1%, 2%, 3%, 4%, 5%, 6%, 7%, 8%, 9%, 10%, 15%, 20%, 30%, 40%, 50%, 60%, 70%, 80%, 90%, 100%, 1.5-fold, 2-fold, 3-fold, 4-fold, 5-fold, 6-fold, 7-fold, 8-fold, 9-fold, 10-fold, 12-fold, 15-fold, 18-fold, 20-fold, 25-fold, or 30-fold higher than the combined expression level of both the same heterologous non-arenaviral polypeptide and the same second heterologous non-arenaviral polypeptide expressed under control of arenavirus 5′ UTRs (i.e., the same heterologous non-arenaviral polypeptide is expressed under control of an arenavirus 5′ UTR and the same second heterologous non-arenaviral polypeptide is expressed under control of an arenavirus 5′ UTR).

[0283] In certain embodiments, one heterologous non-arenaviral polypeptide is expressed under control of an arenavirus 3′ UTR and the other heterologous non-arenaviral polypeptide is expressed under control of an arenavirus 5′ UTR. In certain embodiments, the heterologous non-arenaviral polypeptide is expressed under control of an arenavirus 3′ UTR and the second heterologous non-arenaviral polypeptide is expressed under control of an arenavirus 5′ UTR. In certain embodiments, the proportion of cells that express both the heterologous non-arenaviral polypeptide and the second heterologous non-arenaviral polypeptide (e.g., cells that co-express the heterologous non-arenaviral polypeptide and the second heterologous non-arenaviral polypeptide) is at least about 1%, 2%, 3%, 4%, 5%, 6%, 7%, 8%, 9%, 10%, 15%, 20%, 30%, 40%, 50%, 60%, 70%, 80%, 90%, 100%, 1.5-fold, 2-fold, 3-fold, 4-fold, 5-fold, 6-fold, 7-fold, 8-fold, 9-fold, 10-fold, 12-fold, 15-fold, 18-fold, 20-fold, 25-fold, or 30-fold higher than the proportion of cells that express both the same heterologous non-arenaviral polypeptide and the same second heterologous non-arenaviral polypeptide expressed under control of arenavirus 5′ UTRs (i.e., the same heterologous non-arenaviral polypeptide is expressed under control of an arenavirus 5′ UTR and the same second heterologous non-arenaviral polypeptide is expressed under control of an arenavirus 5′ UTR). In some embodiments, the proportion of cells is determined after a population of cells are infected with an arenavirus of the present disclosure (e.g., one heterologous non-arenaviral polypeptide is expressed under control of an arenavirus 3′ UTR and the other heterologous non-arenaviral polypeptide is expressed under control of an arenavirus 5′ UTR). In some embodiments, the proportion of cells is determined after a population of cells are infected with another arenavirus (e.g., both heterologous non-arenaviral polypeptides expressed under control of an arenavirus 5′ UTR).

[0284] In certain embodiments, one heterologous non-arenaviral polypeptide is expressed under control of an arenavirus 5′ UTR and the other heterologous non-arenaviral polypeptide is expressed under control of an arenavirus 3′ UTR. In certain embodiments, the heterologous non-arenaviral polypeptide is expressed under control of an arenavirus 5′ UTR and the second heterologous non-arenaviral polypeptide is expressed under control of an arenavirus 3′ UTR. In certain embodiments, the heterologous non-arenaviral polypeptide is expressed under control of an arenavirus 5′ UTR in one S segment and the second heterologous non-arenaviral polypeptide is expressed under control of an arenavirus 3′ UTR in another S segment. In certain embodiments, the proportion of cells that express both the heterologous non-arenaviral polypeptide and the second heterologous non-arenaviral polypeptide (e.g., cells that co-express the heterologous non-arenaviral polypeptide and the second heterologous non-arenaviral polypeptide) is at least about 1%, 2%, 3%, 4%, 5%, 6%, 7%, 8%, 9%, 10%, 15%, 20%, 30%, 40%, 50%, 60%, 70%, 80%, 90%, 100%, 1.5-fold, 2-fold, 3-fold, 4-fold, 5-fold, 6-fold, 7-fold, 8-fold, 9-fold, 10-fold, 12-fold, 15-fold, 18-fold, 20-fold, 25-fold, or 30-fold higher than the proportion of cells that express both the same heterologous non-arenaviral polypeptide and the same second heterologous non-arenaviral polypeptide expressed under control of arenavirus 5′ UTRs (i.e., the same heterologous non-arenaviral polypeptide is expressed under control of an arenavirus 5′ UTR in one S segment and the same second heterologous non-arenaviral polypeptide is expressed under control of an arenavirus 5′ UTR in another S segment). In some embodiments, the proportion of cells is determined after a population of cells are infected with an arenavirus of the present disclosure (e.g., one heterologous non-arenaviral polypeptide is expressed under control of an arenavirus 3′ UTR and the other heterologous non-arenaviral polypeptide is expressed under control of an arenavirus 5′ UTR). In some embodiments, the proportion of cells is determined after a population of cells are infected with another arenavirus (e.g., both heterologous non-arenaviral polypeptides expressed under control of an arenavirus 5′ UTR).

[0285] In certain embodiments, the nucleotide sequence provided herein comprises a first open reading frame (ORF) and a second ORF, and one of the two ORFs is in sense orientation and the other ORF is in antisense orientation. In certain embodiments, the first ORF is in sense orientation and the second ORF is in antisense orientation. In other embodiments, the first ORF is in antisense orientation and the second ORF is in sense orientation. In certain embodiments, the first ORF and/or the second ORF is part of a transcription unit that further comprises another ORF, wherein the other ORF and each of the first ORF and/or the second ORF are separated by an internal ribosome entry site (IRES).

[0286] In certain embodiment, the functional fragment is encoded alone by the first ORF or the second ORF. In certain embodiments, the functional fragment is fused to a heterologous non-arenaviral polypeptide or a polypeptide selected from an arenavirus GP, NP, Z and L. In certain embodiment, the functional fragment is under control of an arenavirus 3′ UTR. In other embodiments, the functional fragment is under control of an arenavirus 5′ UTR. In certain embodiment, the functional fragment encoded by the first ORF is different from the functional fragment encoded by the second ORF.

[0287] In certain embodiments, the functional fragment encoded by the first ORF or the second ORF is arenavirus GP signal peptide. In certain embodiments, the arenavirus GP signal peptide is not fused to an arenavirus GP, NP, Z or L.

[0288] In certain embodiments, the nucleotide provided herein is an mRNA. In certain embodiments, the nucleotide provided herein is an mRNA comprising an internal ribosome entry site (IRES). In other embodiments, the nucleotide provided herein is a DNA. In certain embodiments, the nucleotide provided herein can be translated into a product, for example a polypeptide. In certain embodiments, the nucleotide provided herein is a DNA that can be transcribed to produce an arenavirus genomic or antigenomic RNA segment. In certain embodiments, the nucleotide sequence as described herein can be part of a DNA expression vector.

[0289] Non-limiting examples of the polypeptides encoded by the first and second ORFs are illustration in Table 1.

TABLE 1
Non-limiting examples of the polypeptides encoded
by the first and second ORFs.

| | 1^{st} ORF | | |
|---|---|---|---|
| | Functional | | Functional |
| | fragment of a first | | fragment of a |
| | polypeptide and a | | first |
| | heterologous | | polypeptide |
| | non-arenaviral | | and a third |
| | polypeptide | Functional | polypeptide |
| | (fused together | fragment | (fused together |
| | or separated | of a first | or separated |
| 2^{nd} ORF | by an IRES) | polypeptide | by an IRES) |
| Functional fragment | Exemplary | Exemplary | Exemplary |
| of a first polypeptide | combination | combination | combination |
| and a heterologous | | | |
| non-arenaviral | | | |
| polypeptide | | | |
| (fused together or | | | |
| separated by an | | | |
| IRES) | | | |
| Functional fragment | Exemplary | Exemplary | Exemplary |
| of a first polypeptide | combination | combination | combination |
| Functional fragment | Exemplary | Exemplary | Exemplary |
| of a first polypeptide | combination | combination | combination |
| and a third | | | |
| polypeptide | | | |
| (fused together or | | | |
| separated by an | | | |
| IRES) | | | |
| A heterologous non- | Exemplary | Exemplary | Exemplary |
| arenaviral | combination | combination | combination |
| polypeptide | | | |
| A second | Exemplary | Exemplary | Exemplary |
| polypeptide | combination | combination | combination |
| Functional fragment | Exemplary | Exemplary | Exemplary |
| of a second | combination | combination | combination |
| polypeptide and a | | | |
| heterologous non- | | | |
| arenaviral | | | |
| polypeptide | | | |
| (fused together or | | | |
| separated by an | | | |
| IRES) | | | |
| Functional fragment | Exemplary | Exemplary | Exemplary |
| of a second | combination | combination | combination |
| polypeptide | | | |
| Functional fragment | Exemplary | Exemplary | Exemplary |
| of a second | combination | combination | combination |
| polypeptide and a | | | |
| third polypeptide | | | |
| (fused together or | | | |
| separated by an | | | |
| IRES) | | | |

[0290] In certain embodiments, the functional fragment is selected from the group consisting of arenavirus GP signal peptide, arenavirus GP1 and arenavirus GP2. Non-limiting examples of the polypeptides encoded by the first and second ORFs related to functional fragments of GP are illustrated in Table 2.

TABLE 2
Non-limiting examples of the polypeptides encoded by the first and second
ORFs related to functional fragments of GP.

| First ORF | Second ORF |
|---|---|
| GP signal peptide and a heterologous non- | A heterologous non-arenaviral |
| arenaviral polypeptide | signal peptide, arenavirus GP1, |
| | and arenavirus GP2 |
| GP signal peptide and a heterologous non- | A heterologous non-arenaviral |
| arenaviral polypeptide | polypeptide |
| GP signal peptide and a heterologous non- | NP |
| arenaviral polypeptide | |
| GP signal peptide and a heterologous non- | Z |
| arenaviral polypeptide | |
| GP signal peptide and a heterologous non- | L |
| arenaviral polypeptide | |
| GP signal peptide and a heterologous non- | No second ORF |
| arenaviral polypeptide | |
| GP signal peptide | A heterologous non-arenaviral |
| | signal peptide, arenavirus GP1, |
| | and arenavirus GP2 |
| GP signal peptide | A heterologous non-arenaviral |
| | polypeptide |
| GP signal peptide | NP |
| GP signal peptide | Z |
| GP signal peptide | L |
| GP signal peptide | No second ORF |
| GP signal peptide and NP | A heterologous non-arenaviral |
| | signal peptide, arenavirus GP1, |
| | and arenavirus GP2 |
| GP signal peptide and NP | A heterologous non-arenaviral |
| | polypeptide |
| GP signal peptide and NP | Z |
| GP signal peptide and NP | L |
| GP signal peptide and NP | No second ORF |
| GP signal peptide and Z | A heterologous non-arenaviral |
| | signal peptide, arenavirus GP1, |
| | and arenavirus GP2 |
| GP signal peptide and Z | A heterologous non-arenaviral |
| | polypeptide |
| GP signal peptide and Z | NP |
| GP signal peptide and Z | L |
| GP signal peptide and Z | No second ORF |
| GP signal peptide and L | A heterologous non-arenaviral |
| | signal peptide, arenavirus GP1, |
| | and arenavirus GP2 |
| GP signal peptide and L | A heterologous non- |
| | arenaviral polypeptide |
| GP signal peptide and L | NP |
| GP signal peptide and L | Z |
| GP signal peptide and L | No second ORF |
| GP1, GP2 and a heterologous non- | GP signal peptide and a |
| arenaviral signal peptide | heterologous |
| | non-arenaviral polypeptide |
| GP1, GP2 and a heterologous non- | GP signal peptide |
| arenaviral signal peptide | |
| GP1, GP2 and a heterologous non- | A heterologous non- |
| arenaviral signal peptide | arenaviral polypeptide |
| GP1, GP2 and a heterologous non- | NP |
| arenaviral signal peptide | |
| GP1, GP2 and a heterologous non- | Z |
| arenaviral signal peptide | |
| GP1, GP2 and a heterologous non- | L |
| arenaviral signal peptide | |
| GP1, GP2 and a heterologous non- | No second ORF |
| arenaviral signal peptide | |

### 5.4.1 Arenavirus Genomic or Antigenomic Segment Related to the Nucleotide Sequence Provided Herein

[0291] In certain embodiments, the nucleotide sequence provided herein is an arenavirus genomic or antigenomic segment. In certain embodiments, the nucleotide sequence is an arenavirus genomic or antigenomic S segment. In certain embodiments, the nucleotide sequence is an arenavirus genomic or antigenomic L segment. In certain embodiments, the nucleotide sequence provided herein can be derived from an arenavirus genomic or antigenomic segment.

[0292] In certain embodiments, the first ORF and the second ORF of the nucleotide sequence as described herein are in an S segment or derived from an S segment and separated by an arenavirus intergenic region (IGR). In certain embodiments, the first ORF and the second ORF of the nucleotide sequence as described herein are in an L segment or derived from an L segment and separated by an arenavirus intergenic region (IGR). In certain embodiments, the first ORF in an S segment is under control of an arenavirus 3′ untranslated region (UTR) whereas the second ORF in the S segment is under control of an arenavirus 5′ UTR. In certain embodiments, the first ORF in an L segment is under control of an arenavirus 3′ untranslated region (UTR) whereas the second ORF in the L segment is under control of an arenavirus 5′ UTR. In certain embodiments, the first ORF in an S segment is under control of an arenavirus 5′ UTR whereas the second ORF in the S segment is under control of an arenavirus 3′ UTR. In certain embodiments, the first ORF in an L segment is under control of an arenavirus 5′ UTR whereas the second ORF in the L segment is under control of an arenavirus 3′ UTR.

[0293] More details on the arenavirus genomic or antigenomic segment provided herein are described in Section 5.6.

### 5.4.2 Arenavirus Particles Comprising the Nucleotide Sequence Provided Herein

[0294] In certain embodiments, provided herein is an arenavirus particle containing a genome comprising the nucleotide sequence provided herein. In certain embodiments, the genome of the arenavirus particle consists of an S segment and an L segment.

[0295] In certain embodiments, the arenavirus particle is tri-segmented. In certain embodiments, the tri-segmented arenavirus particle comprises two S segments and an L segment. In certain embodiments, the tri-segmented arenavirus particle comprises an S segment and two L segments.

[0296] In certain embodiments, the genome of the arenavirus particle consists of
[0297] a) an S segment that encodes arenavirus GP signal peptide and a heterologous non-arenaviral polypeptide or arenavirus GP signal peptide alone under the control of an arenavirus 3′ UTR and a heterologous non-arenaviral signal peptide, arenavirus GP1 and arenavirus GP2 under the control of an arenavirus 5′ UTR;
[0298] b) an S segment that encodes NP under the control of an arenavirus 3′ UTR and another heterologous non-arenaviral polypeptide or no polypeptide under the control of an arenavirus 5′ UTR; and
[0299] c) an L segment that encodes L protein under the control of an arenavirus 3′ UTR and Z protein under the control of an arenavirus 5′ UTR; and
   wherein the two heterologous non-arenaviral polypeptides are the same or different from each other.

[0300] In certain embodiments, the genome of the arenavirus particle consists of
[0301] a) an S segment that encodes arenavirus GP signal peptide and a heterologous non-arenaviral polypeptide or arenavirus GP signal peptide alone under the control of an arenavirus 3′ UTR and another heterologous non-arenaviral polypeptide or no polypeptide under the control of an arenavirus 5′ UTR;
[0302] b) an S segment that encodes NP under the control of an arenavirus 3′ UTR and a heterologous non-arenaviral signal peptide, arenavirus GP1 and arenavirus GP2 under the control of an arenavirus 5′ UTR; and
[0303] c) an L segment that encodes L protein under the control of an arenavirus 3′ UTR and Z protein under the control of an arenavirus 5′ UTR; and
   wherein the two heterologous non-arenaviral polypeptides are the same or different from each other.

[0304] In certain embodiments, the arenavirus particle is derived from a Lassa virus. In certain embodiments, the arenavirus particle is derived from a Lymphocytic choriomeningitis virus (LCMV). In certain embodiments, the LCMV is a MP strain, a WE strain, an Armstrong strain, or an Armstrong Clone 13 strain. In certain embodiments, the arenavirus particle is derived from a Pichinde virus (PICV). In certain embodiments, the arenavirus particle is derived from a Junin virus vaccine Candid #1, or a Junin virus vaccine XJ Clone 3 strain. In certain embodiments, the arenavirus particle is derived from an Oliveros virus. In certain embodiments, the arenavirus particle is derived from a Tamiami virus. In certain embodiments, the arenavirus particle is derived from a Mobala virus. In certain embodiments, the arenavirus particle is derived from a Mopeia virus. In certain embodiments, the arenavirus particle is derived from an Ippy virus. In certain embodiments, the arenavirus particle is derived from an Amapari virus. In certain embodiments, the arenavirus particle is derived from a Flexal virus. In certain embodiments, the arenavirus particle is derived from a Guanarito virus. In certain embodiments, the arenavirus particle is derived from a Latino virus. In certain embodiments, the arenavirus particle is derived from a Machupo virus. In certain embodiments, the arenavirus particle is derived from a Parana virus. In certain embodiments, the arenavirus particle is derived from a Pirital virus. In certain embodiments, the arenavirus particle is derived from a Sabia virus. In certain embodiments, the arenavirus particle is derived from a Tacaribe virus. In certain embodiments, the arenavirus particle is derived from a Bear Canyon virus. In certain embodiments, the arenavirus particle is derived from a Whitewater Arroyo virus. In certain embodiments, the arenavirus particle is derived from an Allpahuayo virus (ALLV). In certain embodiments, the arenavirus particle is derived from an Alxa virus. In certain embodiments, the arenavirus particle is derived from a Chapare virus. In certain embodiments, the arenavirus particle is derived from a Lijiang virus. In certain embodiments, the arenavirus particle is derived from a Cupixi virus. In certain embodiments, the arenavirus particle is derived from a Gairo virus. In certain embodiments, the arenavirus particle is derived from a Loei River virus. In certain embodiments, the arenavirus particle is derived from a Lujo virus. In certain embodiments, the arenavirus particle is derived from a Luna virus. In certain embodiments, the arenavirus particle is derived from a Luli virus. In certain embodiments, the arenavirus particle is derived from a Lunk virus. In certain embodiments, the arenavirus particle is derived from a Mariental virus. In certain embodiments, the arenavirus particle is derived from a Merino Walk virus. In certain embodiments, the arenavirus particle is derived from a Morogoro virus. In certain embodiments, the arenavirus particle is derived from an Okahandja virus. In certain embodiments, the arenavirus particle is derived from an Aporé virus. In certain embodiments, the arenavirus particle is derived from a Ryukyu virus. In certain embodiments, the arenavirus particle is derived from a Solwezi virus. In certain embodiments, the arenavirus particle is derived from a souris virus. In certain embodiments, the arenavirus particle is derived from a Wenzhou virus. In certain embodiments, the arenavirus particle is derived from a Big Brushy Tank virus. In certain embodiments, the arenavirus particle is derived from a Catarina virus. In certain embodiments, the arenavirus particle is derived from a Skinner Tank virus. In certain embodiments, the arenavirus particle is derived from a Tonto Creek virus. In certain embodiments, the arenavirus particle is derived from a Xapuri virus.

[0305] In certain embodiments, the genome of the arenavirus particle encodes the heterologous non-arenaviral polypeptide and/or the second heterologous non-arenaviral polypeptide, and the growth or infectivity of the arenavirus particle is not inferior to a second arenavirus particle, wherein the genome of the second arenavirus particle encodes the same heterologous non-arenaviral polypeptide and/or the same second heterologous non-arenaviral polypeptide; and wherein all arenaviral GP, NP, Z and L in the second arenavirus particle are each expressed as one ORF.

[0306] In certain embodiments, the arenavirus particle is infectious and replication competent. In certain embodiments, the arenavirus particle is attenuated as compared to its parental virus. In certain embodiments, the arenavirus particle is infectious but unable to produce further infectious progeny in non-complementing cells.

[0307] In certain embodiments, the titer of the arenavirus particle is at least about 1%, 2%, 3%, 4%, 5%, 6%, 7%, 8%, 9%, 10%, 15%, 20%, 30%, 40%, 50%, 60%, 70%, 80%, 90%, 100%, 1.5-fold, 2-fold, 3-fold, 4-fold, 5-fold, 6-fold, 7-fold, 8-fold, 9-fold, 10-fold, 12-fold, 15-fold, 18-fold, 20-fold, 25-fold, or 30-fold lower during a persistent infection in AGRAG mice than the titer of the respective wild-type parental arenavirus particle.

[0308] In certain embodiments, the arenavirus particle expresses a heterologous non-arenaviral polypeptide under control of an arenavirus 3′ UTR; wherein the arenavirus particle induces at least about 1%, 2%, 3%, 4%, 5%, 6%, 7%, 8%, 9%, 10%, 15%, 20%, 30%, 40%, 50%, 60%, 70%, 80%, 90%, 100%, 1.5-fold, 2-fold, 3-fold, 4-fold, 5-fold, 6-fold, 7-fold, 8-fold, 9-fold, 10-fold, 12-fold, 15-fold, 18-fold, 20-fold, 25-fold, or 30-fold higher immune responses against the heterologous non-arenaviral polypeptide than another arenavirus particle expressing the same heterologous non-arenaviral polypeptide under control of an arenavirus 5′ UTR. In some embodiments, an immune response (e.g., a higher immune response) is obtained after an arenavirus particle of the present disclosure (e.g., arenavirus particle expressing a heterologous non-arenaviral polypeptide under control of an arenavirus 3′ UTR) is administered to a subject. In some embodiments, an immune response is obtained after an arenavirus particle expressing the heterologous non-arenaviral polypeptide under control of an arenavirus 5′ UTR is administered to a subject or to a comparable subject. In some embodiments, an immune response obtained after an arenavirus particle of the present disclosure is administered to a subject is compared to an immune response obtained after another arenavirus particle (e.g., arenavirus particle expressing the heterologous non-arenaviral polypeptide under control of an arenavirus 5′ UTR) is administered to a subject or to a comparable subject. In some embodiments, the subject and/or the comparable subject is a subject in need of treatment. In some embodiments, the subject and/or the comparable subject is a subject with a disease and/or with symptoms of a disease. In some embodiments, the comparable subject is a healthy subject. In some embodiments, the comparable subject is a subject without the disease. In some embodiments, the comparable subject is a subject not in need of treatment.

[0309] In certain embodiments, provided herein is an arenavirus particle comprising the nucleotide sequence provided herein. In certain embodiments, the arenavirus particle described herein is genetically stable. In certain embodiments, the arenavirus particle described herein provides high-level transgene expression. In certain embodiments, the arenavirus particle is bi-segmented, namely consists of two arenavirus genomic or antigenomic segments. In certain embodiments, the two arenavirus genomic or antigenomic segments are one S segment and one L segment. In certain embodiments, the arenavirus particle is tri-segmented, namely consists of three arenavirus genomic or antigenomic segments. In certain embodiments, the three arenavirus genomic or antigenomic segments are two S segments and one L segment. In other embodiments, the three arenavirus genomic or antigenomic segments are one S segment and two L segments. More details on the arenavirus genomic or antigenomic segment provided herein are described in Section 5.6.

### 5.4.3 Compositions and Methods Related to the Nucleotide Sequence Provided Herein

[0310] In certain embodiments, provided herein is a translation product of the nucleotide sequence provided herein.

[0311] In certain embodiments, the nucleotide sequence is a DNA sequence, which can be transcribed into an arenavirus genomic or antigenomic segment. In certain embodiments, provided herein is a method of producing an arenavirus genomic or antigenomic RNA segment, wherein the method comprises transcribing the DNA sequence provided herein.

[0312] In certain embodiments, provided herein is a method of generating an arenavirus particle, wherein the method comprises:
[0313] a) transfecting into a host cell one or more DNA sequences provided herein or one or more RNA sequences each transcribed in vitro from the DNA sequence provided herein;
[0314] b) transfecting into the host cell nucleotide sequences encoding arenavirus trans-acting factors;
[0315] c) maintaining the host cell under conditions suitable for virus formation; and
[0316] d) harvesting the arenavirus particle.

[0317] In certain embodiments, the one or more DNA sequences are transcribed using a bidirectional promoter. In certain embodiments, the one or more DNA sequences are transcribed under the control of a promoter selected from the group consisting of:
[0318] a) a RNA polymerase I promoter;
[0319] b) a RNA polymerase II promoter; and
[0320] c) a T7 promoter.

[0321] In certain embodiments, provided herein is a DNA expression vector comprising the nucleotide sequence provided herein.

[0322] In certain embodiments, provided herein is a method of rescuing an arenavirus particle using the nucleotide sequence provided herein.

[0323] In certain embodiments, provided herein is a host cell comprising the nucleotide sequence provided herein, the translation product provided herein, the arenavirus particle provided herein, or the DNA expression vector provided herein.

[0324] In certain embodiments, provided herein is a vaccine comprising the nucleotide sequence provided herein, the translation product provided herein, the arenavirus particle provided herein, and a pharmaceutically acceptable carrier.

[0325] In certain embodiments, provided herein is a pharmaceutical composition comprising the nucleotide sequence provided herein, the translation product provided herein, the arenavirus particle provided herein, and a pharmaceutically acceptable carrier.

### 5.5 Arenavirus Particle Provided Herein

[0326] In another aspect, provided herein are arenavirus particles. In certain embodiments, provided herein is an arenavirus particle engineered such that an arenaviral ORF is separated over two or more mRNA transcripts.

[0327] In certain embodiments, at least one of the mRNA transcripts comprises an internal ribosome entry site (IRES).

[0328] In certain embodiments, the mRNA transcripts can be transcribed from the arenavirus genomic or antigenomic segment. In certain embodiments, the arenavirus genomic or antigenomic segment is an S segment. In certain embodiments, the arenavirus genomic or antigenomic segment is an L segment.

[0329] In certain embodiments, the two or more mRNA transcripts are under control of an arenavirus 3′ UTR or an arenavirus 5′ UTR.

[0330] In certain embodiments, the arenaviral ORF encodes a polypeptide comprising an amino acid sequence that is at least 80%, 85%, 90%, 95%, 96%, 97%, 98%, 99% and 100% identical to the amino acid sequence of SEQ ID NO:1, SEQ ID NO:2, SEQ ID NO:3, SEQ ID NO:4, SEQ ID NO:5, SEQ ID NO:6, SEQ ID NO:7, SEQ ID NO:8, SEQ ID NO:9, SEQ ID NO:10, SEQ ID NO: 11, SEQ ID NO:12, SEQ ID NO:13, SEQ ID NO:14, SEQ ID NO:15, SEQ ID NO:16, SEQ ID NO:17, SEQ ID NO:18, SEQ ID NO:19, SEQ ID NO:20, SEQ ID NO:21, SEQ ID NO:22, SEQ ID NO:23, SEQ ID NO:24, SEQ ID NO:48, SEQ ID NO:52, SEQ ID NO:59, SEQ ID NO:66, SEQ ID NO:73, SEQ ID NO:80, SEQ ID NO:84, SEQ ID NO:91, SEQ ID NO:98, SEQ ID NO:105, SEQ ID NO:109, SEQ ID NO:113, SEQ ID NO:120, SEQ ID NO:127, SEQ ID NO:134, SEQ ID NO:49, SEQ ID NO:56, SEQ ID NO:63, SEQ ID NO:70, SEQ ID NO:77, SEQ ID NO:81, SEQ ID NO:88, SEQ ID NO:95, SEQ ID NO:102, SEQ ID NO:106, SEQ ID NO:110, SEQ ID NO: 117, SEQ ID NO:124, SEQ ID NO:131, SEQ ID NO:138, SEQ ID NO:50, SEQ ID NO:57, SEQ ID NO:64, SEQ ID NO:71, SEQ ID NO:78, SEQ ID NO:82, SEQ ID NO:89, SEQ ID NO:96, SEQ ID NO:103, SEQ ID NO:107, SEQ ID NO:111, SEQ ID NO: 118, SEQ ID NO:125, SEQ ID NO:132, SEQ ID NO:139, SEQ ID NO:51, SEQ ID NO:58, SEQ ID NO:65, SEQ ID NO:72, SEQ ID NO:79, SEQ ID NO:83, SEQ ID NO:90, SEQ ID NO:97, SEQ ID NO:104, SEQ ID NO:108, SEQ ID NO: 112, SEQ ID NO: 119, SEQ ID NO:126, SEQ ID NO:133, or SEQ ID NO:140. In certain embodiments, the arenaviral ORF encodes a polypeptide comprising an amino acid sequence that is identical to SEQ ID NO:1, SEQ ID NO:2, SEQ ID NO:3, SEQ ID NO:4, SEQ ID NO:5, SEQ ID NO:6, SEQ ID NO:48, SEQ ID NO:52, SEQ ID NO:59, SEQ ID NO:66, SEQ ID NO:73, SEQ ID NO:80, SEQ ID NO:84, SEQ ID NO:91, SEQ ID NO:98, SEQ ID NO:105, SEQ ID NO:109, SEQ ID NO: 113, SEQ ID NO:120, SEQ ID NO:127, or SEQ ID NO:134.

[0331] In certain embodiments, the arenaviral ORF encodes arenavirus GP signal peptide, arenavirus GP1 and GP2 and the arenavirus GP signal peptide or a functional fragment thereof is expressed from a first mRNA transcript (e.g., viral mRNA transcript) and arenavirus GP1 and GP2 are expressed from a second mRNA transcript (e.g., viral mRNA transcript).

[0332] In certain embodiments, the first mRNA transcript is under control of an arenavirus 3′ UTR.

[0333] In certain embodiments, the second mRNA transcript further encodes a heterologous non-arenaviral signal peptide.

[0334] In certain embodiments, the heterologous non-arenaviral signal peptide is the signal peptide of the vesicular stomatitis virus serotype Indiana glycoprotein.

[0335] In certain embodiments, the first mRNA transcript further comprises a nucleotide sequence encoding a heterologous non-arenaviral polypeptide or arenavirus GP, NP, Z and L.

[0336] In certain embodiments, the heterologous non-arenaviral polypeptide is an antigen derived from an infectious organism, tumor, or allergen. In certain embodiments, the antigen is selected from the group consisting of

(a) viral antigens, and the viral antigen is from a virus family selected from the group consisting of adenoviridae, herpesviridae, leviviridae, orthomyxoviridae, parvoviridae, filoviridae, hantaviridae, poxviridae, papillomaviridae, polyomaviridae, paramyxoviridae, pneumoviridae, picornaviridae, reoviridae, retroviridae, flaviviridae, hepadnaviridae, togaviridae, rhabdoviridae, arenaviridae, and coronaviridae;
(b) bacterial antigens, and the bacterial antigen is from a bacteria family selected from the group consisting of Aquaspirillum family, Azospirillum family, Azotobacteraceae family, Bacteroidaceae family, Bartonellaceae family, Bdellovibrio family, Campylobacteraceae family, Chlamydiaceae family, Clostridiaceae family, Enterobacteriaceae family, Gardinella family, Pasteurellaceae family, Halobacteriaceae family, Helicobacter family, Legionallaceae family, Listeriaceae family, Methylococcaceae family, mycobacteriaceae, Neisseriaceae family, Oceanospirillum family, Pasteurellaceae family, Streptococcaceae family, Pseudomonadaceae family, Rhizobiaceae family, Spirillum family, Spirosomaceae family, Staphylococcaceae family, Helicobacter family, Yersinia family, Bacillus antracis and Vampirovibrio family, and
(c) tumor neoantigens or neo-epitopes and tumor associated antigens; and the tumor associated antigen is selected from the group consisting of artificial fusion protein of HPV 16 E7 and E6 proteins, oncogenic viral antigens, cancer-testis antigens, oncofetal antigens, tissue differentiation antigens, mutant protein antigens, Adipophilin, AIM-2, ALDHIAI, BCLX (L), BING-4, CALCA, CD45, CPSF, cyclin DI, DKKI, ENAH (hMcna), Ga733 (EpCAM), EphA3, EZH2, FGF5, glypican-3, G250/MN/CAIX, HER-2/neu, IDOI, IGF2B3, IL13Ralpha2, Intestinal carboxyl esterase, alphafoetoprotein, Kallikrein 4, KIF20A, Lengsin, M-CSF, MCSP, mdm-2, Meloe, MMP-2, MMP-7, MUCl, MUC5AC, p53 (non-mutant), PAX5, PBF, PRAME, PSMA, RAGE, RAGE-I, RGS5, RhoC, RNF43, RU2AS, secernin 1, SOX10, STEAPI (six-transmembrane epithelial antigen of the prostate 1), survivin, Telomerase, VEGF, WT1, EGF-R, CEA, CD20, CD33, CD52, MELANA/MART1, MART2, NY-ESO-1, p53, MAGE Al, MAGE A3, MAGE-4, MAGE-5, MAGE-6, CDK4, alpha-actinin-4, ARTC1, BCR-ABL, BCR-ABL fusion protein (b3a2), B-RAF, CASP-5, CASP-8, beta-catenin, Cdc27, CDK4, CDKN2A, CLPP, COA-1, dek-can fusion protein, EFTUD2, Elongation factor 2, ETV6-AML, ETV6-AML1 fusion protein, FLT3-ITD, FNl, GPNMB, LDLR-fucosyltransferase fusion protein, NFYC, OGT, OS-9, pml-RARalpha fusion protein, PRDX5, PTPRK, H-ras, K-ras (V-Ki-ras2 Kirsten rat sarcoma viral oncogene), N-ras, RBAF600, SIRT2, SNRPDl, SSX, SSX2, SYT-SSX1 or -SSX2 fusion protein, TGFbetaRII, Triosephosphate isomerase, ormdm-2, LMP2, HPV E6, HPV E7, EGFRvIII (epidermal growth factor variant III), Idiotype, GD2, ganglioside G2), Ras-mutant, p53 (mutant), Proteinase3 (PRI), Tyrosinase, PSA, hTERT, Sarcoma translocation breakpoints, EphA2, prostatic acid phosphatase PAP, neo-PAP, ML-IAP, AFP, ERG (TMPRSS2 ETS Fusion gene), NAI 7, PAX3, ALK, Androgen Receptor, Cyclin B1, Polysialic acid, MYCN, TRP2, TRP2-Int2, GD3, Fucosyl GMI, Mesothelin, PSCA, sLe(a), cyp1B1, PLACI, GM3, BORIS, Tn, GLoboH, NY-BR-I, SART3, STn, Carbonic Anhydrase IX, OY-TESI, Sperm protein 17, LCK, high molecular weight melanoma-associated antigen (HMWMAA), AKAP-4, SSX2, XAGE 1, B7H3, Legumain, Tie 2, Page4, VEGFR2, MAD-CT-I, FAP, PDGFR-beta, MADCT-2, For-related antigen 1, TRPI, GP100, CA-125, CA19-9, Calretinin, Epithelial membrane antigen (EMA), Epithelial tumor antigen (ETA), CD19, CD34, CD99, CDI 17, Chromogranin, Cytokeratin, Desmin, Glial fibrillary acidic protein (GFAP), gross cystic disease fluid protein (GCDFP-15), HMB-45 antigen, Myo-DI, muscle-specific actin (MSA), neurofilament, neuronspecific enolase (NSE), placental alkaline phosphatase, synaptophysis, thyroglobulin, thyroid transcription factor-1, dimeric form of the pyruvate kinase isoenzyme type M2 (tumor M2-PK), BAGE BAGE-1, CAGE, CTAGE, FATE, GAGE, GAGE-I, GAGE-2, GAGE-3, GAGE-4, GAGE-5, GAGE-6, GAGE-7, HCA661, HOM-TES-85, MAGEA, MAGEB, MAGEC, NA88, NY-SAR-35, SPANXBI, SPAI 7, SSX, SYCP1, TPTE, Carbohydrate/ganglioside GM2 (oncofetal antigen-immunogenic-1 OFA-I-1), GM3, CA 15-3 (CA 27.29\BCAA), CA 195, CA 242, CA 50, CAM 43, CEA, EBNA, EF2, Epstein-Barr virus antigen, HLA-A2, HLA-Al 1, HSP70-2, KIAAO205, MUM-I, MUM-2, MUM-3, Myosin class I, GnTV, Herv-K-mel, LAGE-I, LAGE-2, (sperm protein) SPI 7, SCP-I, P15(58), Hom/Mel-40, E2A-PRL, H4-RET, IGH-IGK, MYL-RAR, TSP-180, P185erbB2, p180erbB-3, c-met, nm-23H1, TAG-72, TAG-72-4, CA-72-4, CAM 17.1, NuMa, 13-catenin, P16, TAGE, CT7, 43-9F, 5T4, 791Tgp72, 13HCG, BCA225, BTAA, CD68\KP1, CO-029, HTgp-175, M344, MG7-Ag, MOV18, NB\70K, NYCO-1, RCAS1, SDCCAG16, TA-90, TAAL6, TLP, TPS, CD22, CD27, CD30, CD70, prostein, TARP (T cell receptor gamma alternate reading frame protein), Trp-p8, integrin avβ3 (CD61), galactin, or Ral-B, CD123, CLL-1, CD38, CS-1, CD138, and ROR1.

[0337] In certain embodiments, the expression level of the heterologous non-arenaviral polypeptide expressed under control of an arenavirus 3′ UTR is at least about 1%, 2%, 3%, 4%, 5%, 6%, 7%, 8%, 9%, 10%, 15%, 20%, 30%, 40%, 50%, 60%, 70%, 80%, 90%, 100%, 1.5-fold, 2-fold, 3-fold, 4-fold, 5-fold, 6-fold, 7-fold, 8-fold, 9-fold, 10-fold, 12-fold, 15-fold, 18-fold, 20-fold, 25-fold, or 30-fold higher than the expression level of the same heterologous non-arenaviral polypeptide expressed under control of the respective arenavirus 5′ UTR. In certain embodiments, at least about, or about, 5%, 10%, 15%, 20%, 25%, 30%, 35%, 40%, 45%, 50%, 55%, 60%, 65%, 70%, 75%, 80%, 85%, 90%, 95%, 99%, or 100% of cells express a heterologous non-arenaviral polypeptide after an arenavirus particle of the present disclosure (e.g., an arenavirus expressing a heterologous non-arenaviral polypeptide under control of an arenavirus 3′ UTR) is introduced to (or infects) the cells (e.g., to a population of cells). In certain embodiments, the proportion of cells that express a heterologous non-arenaviral polypeptide after an arenavirus particle of the present disclosure (e.g., expressing a heterologous non-arenaviral polypeptide under control of an arenavirus 3′ UTR) is introduced to (or infects) a population of cells is higher compared to the proportion of cells that express the heterologous non-arenaviral polypeptide after an arenavirus particle expressing the same heterologous non-arenaviral polypeptide expressed under control of an arenavirus 5′ UTR is introduced to (or infects) a population of cells. In certain embodiments, at least about 1%, 2%, 3%, 4%, 5%, 6%, 7%, 8%, 9%, 10%, 15%, 20%, 25%, 30%, 35%, 40%, 45%, 50%, 55%, 60%, 65%, 70%, 75%, 80%, 85%, 90%, 95%, 99%, or 100% more cells express a heterologous non-arenaviral polypeptide after an arenavirus particle of the present disclosure (e.g., expressing a heterologous non-arenaviral polypeptide under control of an arenavirus 3′ UTR) is introduced to (or infects) a population of cells as compared to the proportion of cells that express the heterologous non-arenaviral polypeptides after an arenavirus particle expressing the same heterologous non-arenaviral polypeptide under control of an arenavirus 5′ UTR is introduced to (or infects) a comparable population of cells. In certain embodiments, the cells are from a biological sample from a subject. In certain embodiments, the biological sample is from an organ (e.g., spleen). In certain embodiments, the biological sample is a blood sample.

[0338] In certain embodiments, the expression level of a heterologous non-arenaviral polypeptide expressed under control of an arenavirus 3′ UTR and/or the expression level of a second heterologous non-arenaviral polypeptide expressed under control of an arenavirus 3′ UTR is at least about 1%, 2%, 3%, 4%, 5%, 6%, 7%, 8%, 9%, 10%, 15%, 20%, 30%, 40%, 50%, 60%, 70%, 80%, 90%, 100%, 1.5-fold, 2-fold, 3-fold, 4-fold, 5-fold, 6-fold, 7-fold, 8-fold, 9-fold, 10-fold, 12-fold, 15-fold, 18-fold, 20-fold, 25-fold, or 30-fold higher than the expression level of the same heterologous non-arenaviral polypeptide expressed under control of the respective arenavirus 5′ UTR and/or higher than the expression level of the same second heterologous non-arenaviral polypeptide expressed under control of the respective arenavirus 5′ UTR. In certain embodiments, at least about, or about, 5%, 10%, 15%, 20%, 25%, 30%, 35%, 40%, 45%, 50%, 55%, 60%, 65%, 70%, 75%, 80%, 85%, 90%, 95%, 99%, or 100% of cells express the heterologous non-arenaviral polypeptide under control of an arenavirus 3′ UTR and/or express the second heterologous non-arenaviral polypeptide under control of an arenavirus 3′ UTR after an arenavirus particle of the present disclosure (e.g., an arenavirus expressing the heterologous non-arenaviral polypeptide under control of an arenavirus 3′ UTR and/or an arenavirus expressing the second heterologous non-arenaviral polypeptide under control of an arenavirus 3′ UTR) is introduced to (or infects) the cells (e.g., to a population of cells). In certain embodiments, the proportion of cells that express the heterologous non-arenaviral polypeptide and/or express the second heterologous non-arenaviral polypeptide after an arenavirus particle of the present disclosure (e.g., expressing the heterologous non-arenaviral polypeptide under control of an arenavirus 3′ UTR and/or expressing the second heterologous non-arenaviral polypeptide under control of an arenavirus 3′ UTR) is introduced to (or infects) a population of cells is higher compared to the proportion of cells that express the heterologous non-arenaviral polypeptide and/or express the second heterologous non-arenaviral polypeptide after an arenavirus particle expressing the same heterologous non-arenaviral polypeptide under control of an arenavirus 5′ UTR and/or expressing the same second heterologous non-arenaviral polypeptide under control of an arenavirus 5′ UTR is introduced to (or infects) a population of cells. In certain embodiments, at least about 1%, 2%, 3%, 4%, 5%, 6%, 7%, 8%, 9%, 10%, 15%, 20%, 25%, 30%, 35%, 40%, 45%, 50%, 55%, 60%, 65%, 70%, 75%, 80%, 85%, 90%, 95%, 99%, or 100% more cells express the heterologous non-arenaviral polypeptide and/or express the second heterologous non-arenaviral polypeptide after an arenavirus particle of the present disclosure (e.g., expressing the heterologous non-arenaviral polypeptide under control of an arenavirus 3′ UTR and/or expressing the second heterologous non-arenaviral polypeptide under control of an arenavirus 3′ UTR) is introduced to (or infects) a population of cells as compared to the proportion (or amount) of cells that express the heterologous non-arenaviral polypeptides and/or express the second heterologous non-arenaviral polypeptides after an arenavirus particle expressing the same heterologous non-arenaviral polypeptide under control of an arenavirus 5′ UTR and/or expressing the same second heterologous non-arenaviral polypeptide under control of an arenavirus 5′ UTR is introduced to (or infects) a comparable population of cells. In certain embodiments, the cells are from a biological sample from a subject. In certain embodiments, the biological sample is from an organ (e.g., spleen). In certain embodiments, the biological sample is a blood sample.

[0339] In certain embodiments, the arenavirus particle expresses two heterologous non-arenaviral polypeptides. In certain embodiments, the expression of a first of the two heterologous non-arenaviral polypeptides is under control of an arenavirus 3′ UTR in a first S segment and the expression of a second of the two heterologous non-arenaviral polypeptides is under control of an arenavirus 5′ UTR in a second S segment. In certain embodiments, the expression of a first of the two heterologous non-arenaviral polypeptides is under control of an arenavirus 5′ UTR in a first S segment and the expression of a second of the two heterologous non-arenaviral polypeptides is under control of an arenavirus 3′ UTR in a second S segment. In certain embodiments, the combined expression level of the two heterologous non-arenaviral polypeptides is at least about, or about 1%, 2%, 3%, 4%, 5%, 6%, 7%, 8%, 9%, 10%, 15%, 20%, 30%, 40%, 50%, 60%, 70%, 80%, 90%, 100%, 1.5-fold, 2-fold, 3-fold, 4-fold, 5-fold, 6-fold, 7-fold, 8-fold, 9-fold, 10-fold, 12-fold, 15-fold, 18-fold, 20-fold, 25-fold, or 30-fold higher than the combined expression level of the same two heterologous non-arenaviral polypeptide expressed under control of arenavirus 5′ UTRs. In certain embodiments, the expression of a first of the same two heterologous non-arenaviral polypeptides is under control of an arenavirus 5′ UTR in a first S segment and the expression of a second of the same two heterologous non-arenaviral polypeptides is under control of an arenavirus 5′ UTR in a second S segment.

[0340] In certain embodiments, one heterologous non-arenaviral polypeptide is expressed under control of an arenavirus 3′ UTR and the other heterologous non-arenaviral polypeptide is expressed under control of an arenavirus 5′ UTR. In certain embodiments, the heterologous non-arenaviral polypeptide is expressed under control of an arenavirus 3′ UTR and the second heterologous non-arenaviral polypeptide is expressed under control of an arenavirus 5′ UTR. In certain embodiments, the heterologous non-arenaviral polypeptide is expressed under control of an arenavirus 3′ UTR in one S segment and the second heterologous non-arenaviral polypeptide is expressed under control of an arenavirus 5′ UTR in another S segment. In certain embodiments, the heterologous non-arenaviral polypeptide is expressed under control of an arenavirus 5′ UTR in one S segment and the second heterologous non-arenaviral polypeptide is expressed under control of an arenavirus 3′ UTR in another S segment. In certain embodiments, the proportion of cells that express both the heterologous non-arenaviral polypeptide and the second heterologous non-arenaviral polypeptide (e.g., cells that co-express the heterologous non-arenaviral polypeptide and the second heterologous non-arenaviral polypeptide) is at least about 1%, 2%, 3%, 4%, 5%, 6%, 7%, 8%, 9%, 10%, 15%, 20%, 30%, 40%, 50%, 60%, 70%, 80%, 90%, 100%, 1.5-fold, 2-fold, 3-fold, 4-fold, 5-fold, 6-fold, 7-fold, 8-fold, 9-fold, 10-fold, 12-fold, 15-fold, 18-fold, 20-fold, 25-fold, or 30-fold higher than the proportion of cells that express both the same heterologous non-arenaviral polypeptide and the same second heterologous non-arenaviral polypeptide expressed under control of arenavirus 5′ UTRs (i.e., the same heterologous non-arenaviral polypeptide is expressed under control of an arenavirus 5′ UTR in one S segment and the same second heterologous non-arenaviral polypeptide is expressed under control of an arenavirus 5′ UTR in another S segment). In some embodiments, the proportion of cells is determined after a population of cells are infected with an arenavirus of the present disclosure (e.g., one heterologous non-arenaviral polypeptide is expressed under control of an arenavirus 3′ UTR and the other heterologous non-arenaviral polypeptide is expressed under control of an arenavirus 5′ UTR). In some embodiments, the proportion of cells is determined after a population of cells are infected with another arenavirus (e.g., both heterologous non-arenaviral polypeptides expressed under control of an arenavirus 5′ UTR).

[0341] In certain embodiments, at least about, or about, 5%, 10%, 15%, 20%, 25%, 30%, 35%, 40%, 45%, 50%, 55%, 60%, 65%, 70%, 75%, 80%, 85%, 90%, 95%, 99%, or 100% of cells express (e.g., co-express) the two heterologous non-arenaviral polypeptides after an arenavirus particle of the present disclosure (e.g., expressing one heterologous non-arenaviral polypeptide under control of an arenavirus 3′ UTR in one S segment and expressing another heterologous non-arenaviral polypeptide under control of an arenavirus 5′ UTR in another S segment) is introduced to (or infects) the cells (e.g., to a population of cells). In certain embodiments, the proportion of cells that express (e.g., co-express) the two heterologous non-arenaviral polypeptides after an arenavirus particle of the present disclosure (e.g., expressing one heterologous non-arenaviral polypeptide under control of an arenavirus 3′ UTR in one S segment and expressing another heterologous non-arenaviral polypeptide under control of an arenavirus 5′ UTR in another S segment) is introduced to (or infects) a population of cells is higher as compared to the proportion of cells that express (e.g., co-express) the two heterologous non-arenaviral polypeptides after an arenavirus particle expressing the same two heterologous non-arenaviral polypeptides under control of arenavirus 5′ UTRs (e.g., expressing one heterologous non-arenaviral polypeptide under control of an arenavirus 5′ UTR of one S segment and expressing the other heterologous non-arenaviral polypeptide under control of an arenavirus 5′ UTR of the other S segment) is introduced to (or infects) a population of cells. In certain embodiments, at least about 1%, 2%, 3%, 4%, 5%, 6%, 7%, 8%, 9%, 10%, 15%, 20%, 25%, 30%, 35%, 40%, 45%, 50%, 55%, 60%, 65%, 70%, 75%, 80%, 85%, 90%, 95%, 99%, or 100% more cells express (e.g., co-express) the two heterologous non-arenaviral polypeptides after an arenavirus particle of the present disclosure (e.g., expressing one heterologous non-arenaviral polypeptide under control of an arenavirus 3′ UTR in one S segment and expressing another heterologous non-arenaviral polypeptide under control of an arenavirus 5′ UTR in another S segment) is introduced to (or infects) a population of cells as compared to the proportion (or amount) of cells that express (e.g., co-express) the two heterologous non-arenaviral polypeptides after an arenavirus particle expressing the same two heterologous non-arenaviral polypeptides under control of arenavirus 5′ UTRs (e.g., expressing one heterologous non-arenaviral polypeptide under control of an arenavirus 5′ UTR of one S segment and expressing the other heterologous non-arenaviral polypeptide under control of an arenavirus 5′ UTR of the other S segment) is introduced to (or infects) a comparable population of cells.

[0342] In certain embodiments, the genome of the arenavirus particle encodes the heterologous non-arenaviral polypeptide and/or the second heterologous non-arenaviral polypeptide, and the growth or infectivity of the arenavirus particle is not inferior to a second arenavirus particle, wherein the genome of the second arenavirus particle encodes the same heterologous non-arenaviral polypeptide and/or the same second heterologous non-arenaviral polypeptide; and wherein all arenaviral GP, NP, Z and L in the second arenavirus particle are each expressed as one ORF.

[0343] In certain embodiments, the genome of the arenavirus particle consists of an S segment and an L segment.

[0344] In certain embodiments, the arenavirus particle is tri-segmented. In certain embodiments, the tri-segmented arenavirus particle comprises two S segments and an L segment. In certain embodiments, the tri-segmented arenavirus particle comprises an S segment and two L segments.

[0345] In certain embodiments, the arenavirus particle comprises a genome organization as outlined in FIG. 4C. In certain embodiments, the arenavirus particle comprises a genome organization as outlined in FIG. 4E.

[0346] In certain embodiments, the genome of the arenavirus particle consists of
[0347] a) an S segment that encodes arenavirus GP signal peptide and a heterologous non-arenaviral polypeptide or arenavirus GP signal peptide alone under the control of an arenavirus 3′ UTR and a heterologous non-arenaviral signal peptide, arenavirus GP1 and arenavirus GP2 under the control of an arenavirus 5′ UTR;
[0348] b) an S segment that encodes NP under the control of an arenavirus 3′ UTR and another heterologous non-arenaviral polypeptide or no polypeptide under the control of an arenavirus 5′ UTR; and
[0349] c) an L segment that encodes L protein under the control of an arenavirus 3′ UTR and Z protein under the control of an arenavirus 5′ UTR; and
   wherein the two heterologous non-arenaviral polypeptides are the same or different from each other.

[0350] In certain embodiments, the genome of the arenavirus particle consists of
[0351] a) an S segment that encodes arenavirus GP signal peptide and a heterologous non-arenaviral polypeptide or arenavirus GP signal peptide alone under the control of an arenavirus 3′ UTR and another heterologous non-arenaviral polypeptide or no polypeptide under the control of an arenavirus 5′ UTR;
[0352] b) an S segment that encodes NP under the control of an arenavirus 3′ UTR and a heterologous non-arenaviral signal peptide, arenavirus GP1 and arenavirus GP2 under the control of an arenavirus 5′ UTR; and
[0353] c) an L segment that encodes L protein under the control of an arenavirus 3′ UTR and Z protein under the control of an arenavirus 5′ UTR; and
   wherein the two heterologous non-arenaviral polypeptides are the same or different from each other.

[0354] In certain embodiments, the arenavirus particle is derived from a Lassa virus. In certain embodiments, the arenavirus particle is derived from a Lymphocytic choriomeningitis virus (LCMV). In certain embodiments, the LCMV is a MP strain, a WE strain, an Armstrong strain, or an Armstrong Clone 13 strain. In certain embodiments, the arenavirus particle is derived from a Pichinde virus (PICV). In certain embodiments, the arenavirus particle is derived from a Junin virus vaccine Candid #1, or a Junin virus vaccine XJ Clone 3 strain. In certain embodiments, the arenavirus particle is derived from an Oliveros virus. In certain embodiments, the arenavirus particle is derived from a Tamiami virus. In certain embodiments, the arenavirus particle is derived from a Mobala virus. In certain embodiments, the arenavirus particle is derived from a Mopeia virus. In certain embodiments, the arenavirus particle is derived from an Ippy virus. In certain embodiments, the arenavirus particle is derived from an Amapari virus. In certain embodiments, the arenavirus particle is derived from a Flexal virus. In certain embodiments, the arenavirus particle is derived from a Guanarito virus. In certain embodiments, the arenavirus particle is derived from a Latino virus. In certain embodiments, the arenavirus particle is derived from a Machupo virus. In certain embodiments, the arenavirus particle is derived from a Parana virus. In certain embodiments, the arenavirus particle is derived from a Pirital virus. In certain embodiments, the arenavirus particle is derived from a Sabia virus. In certain embodiments, the arenavirus particle is derived from a Tacaribe virus. In certain embodiments, the arenavirus particle is derived from a Bear Canyon virus. In certain embodiments, the arenavirus particle is derived from a Whitewater Arroyo virus. In certain embodiments, the arenavirus particle is derived from an Allpahuayo virus (ALLV). In certain embodiments, the arenavirus particle is derived from an Alxa virus. In certain embodiments, the arenavirus particle is derived from a Chapare virus. In certain embodiments, the arenavirus particle is derived from a Lijiang virus. In certain embodiments, the arenavirus particle is derived from a Cupixi virus. In certain embodiments, the arenavirus particle is derived from a Gairo virus. In certain embodiments, the arenavirus particle is derived from a Loei River virus. In certain embodiments, the arenavirus particle is derived from a Lujo virus. In certain embodiments, the arenavirus particle is derived from a Luna virus. In certain embodiments, the arenavirus particle is derived from a Luli virus. In certain embodiments, the arenavirus particle is derived from a Lunk virus. In certain embodiments, the arenavirus particle is derived from a Mariental virus. In certain embodiments, the arenavirus particle is derived from a Merino Walk virus. In certain embodiments, the arenavirus particle is derived from a Morogoro virus. In certain embodiments, the arenavirus particle is derived from an Okahandja virus. In certain embodiments, the arenavirus particle is derived from an Aporé virus. In certain embodiments, the arenavirus particle is derived from a Ryukyu virus. In certain embodiments, the arenavirus particle is derived from a Solwezi virus. In certain embodiments, the arenavirus particle is derived from a souris virus. In certain embodiments, the arenavirus particle is derived from a Wenzhou virus. In certain embodiments, the arenavirus particle is derived from a Big Brushy Tank virus. In certain embodiments, the arenavirus particle is derived from a Catarina virus. In certain embodiments, the arenavirus particle is derived from a Skinner Tank virus. In certain embodiments, the arenavirus particle is derived from a Tonto Creek virus. In certain embodiments, the arenavirus particle is derived from a Xapuri virus.

[0355] In certain embodiments, the arenavirus particle is infectious and replication competent. In certain embodiments, the arenavirus particle is attenuated as compared to its parental wild-type virus. In certain embodiments, the arenavirus particle is infectious but unable to produce further infectious progeny in non-complementing cells.

[0356] In certain embodiments, the titer of the arenavirus particle is at least about 1%, 2%, 3%, 4%, 5%, 6%, 7%, 8%, 9%, 10%, 15%, 20%, 30%, 40%, 50%, 60%, 70%, 80%, 90%, 100%, 1.5-fold, 2-fold, 3-fold, 4-fold, 5-fold, 6-fold, 7-fold, 8-fold, 9-fold, 10-fold, 12-fold, 15-fold, 18-fold, 20-fold, 25-fold, or 30-fold lower during a persistent infection in AGRAG mice than the titer of the respective wild-type parental arenavirus particle.

[0357] In certain embodiments, the arenavirus particle expresses a heterologous non-arenaviral polypeptide under control of an arenavirus 3′ UTR; wherein the arenavirus particle induces at least about 1%, 2%, 3%, 4%, 5%, 6%, 7%, 8%, 9%, 10%, 15%, 20%, 30%, 40%, 50%, 60%, 70%, 80%, 90%, 100%, 1.5-fold, 2-fold, 3-fold, 4-fold, 5-fold, 6-fold, 7-fold, 8-fold, 9-fold, 10-fold, 12-fold, 15-fold, 18-fold, 20-fold, 25-fold, or 30-fold higher immune responses against the heterologous non-arenaviral polypeptide than another arenavirus particle expressing the same heterologous non-arenaviral polypeptide under control of an arenavirus 5′ UTR. In some embodiments, an immune response (e.g., a higher immune response) is obtained after an arenavirus particle of the present disclosure (e.g., arenavirus particle expressing a heterologous non-arenaviral polypeptide under control of an arenavirus 3′ UTR) is administered to a subject. In some embodiments, an immune response is obtained after an arenavirus particle expressing the heterologous non-arenaviral polypeptide under control of an arenavirus 5′ UTR is administered to a subject or to a comparable subject. In some embodiments, an immune response obtained after an arenavirus particle of the present disclosure is administered to a subject is compared to an immune response obtained after another arenavirus particle (e.g., arenavirus particle expressing the heterologous non-arenaviral polypeptide under control of an arenavirus 5′ UTR) is administered to a subject or to a comparable subject. In some embodiments, the subject and/or the comparable subject is a subject in need of treatment. In some embodiments, the subject and/or the comparable subject is a subject with a disease and/or with symptoms of a disease. In some embodiments, the comparable subject is a healthy subject. In some embodiments, the comparable subject is a subject without the disease. In some embodiments, the comparable subject is a subject not in need of treatment.

[0358] In certain embodiments, provided herein is an arenavirus particle engineered such that an arenaviral ORF is separated over two or more mRNA transcripts. In certain embodiments, provided herein is an arenavirus particle comprising the nucleotide sequence provided herein (see Section 5.4). In certain embodiments, provided herein is an arenavirus particle comprising the arenavirus genomic or antigenomic segment provided herein (see Section 5.6). The arenavirus particles described herein are genetically stable and provide high-level transgene expression.

[0359] In certain embodiments, the arenavirus particle is tri-segmented, namely consists of three arenavirus genomic or antigenomic segments. In certain embodiments, the three arenavirus genomic or antigenomic segments are two S segments and one L segment. In other embodiments, the three arenavirus genomic or antigenomic segments are one S segment and two L segments. In certain embodiments, the tri-segmented arenavirus particle comprises arenaviral ORFs encoding arenavirus GP, NP, Z and L. In certain embodiments, the tri-segmented arenavirus particle expresses one or more heterologous non-arenaviral polypeptide. In certain embodiments, the tri-segmented arenavirus particle described herein may consist of six positions in the arenavirus genomic or antigenomic segments, for example, position 1 is under the control of an arenavirus S segment 5′ UTR; position 2 is under the control of an arenavirus S segment 3′ UTR; position 3 is under the control of an arenavirus S segment 5′ UTR; position 4 is under the control of an arenavirus S segment 3′ UTR; position 5 is under the control of an arenavirus L segment 5′ UTR; position 6 is under the control of an arenavirus L segment 3′ UTR. In certain embodiments, positions 1-6 may encode the same polypeptide in two or more positions. In other embodiments, positions 1-6 may each encodes a different polypeptide. In certain embodiments, the tri-segmented arenavirus particle comprising positions 1-6 in the arenavirus genomic or antigenomic segments is replication competent. In other embodiments, the tri-segmented arenavirus particle comprising positions 1-6 in the arenavirus genomic or antigenomic segments is replication-defective.

[0360] In certain embodiments, the arenavirus particle is bi-segmented, namely consists of two arenavirus genomic or antigenomic segments. In certain embodiments, the two arenavirus genomic or antigenomic segments are one S segment and one L segment. In certain embodiments, the genome of a bi-segmented arenavirus particle may consist of four positions in the arenavirus genomic or antigenomic segments, for example, position 1 is under the control of an arenavirus S segment 5′ UTR; position 2 is under the control of an arenavirus S segment 3′ UTR; position 3 is under the control of an arenavirus L segment 5′ UTR; position 4 is under the control of an arenavirus L segment 3′ UTR. In certain embodiments, positions 1-4 may encode the same polypeptide in two or more positions. In other embodiments, positions 1-4 may each encode a different polypeptide. In certain embodiments, the bi-segmented arenavirus particle comprising positions 1-4 in the arenavirus genomic or antigenomic segments is replication competent. In other embodiments, the bi-segmented arenavirus particle comprising positions 1-4 in the arenavirus genomic or antigenomic segments is replication-defective.

[0361] In certain embodiments, the arenavirus particle is derived from a Lymphocytic choriomeningitis virus (LCMV). In certain embodiments, the LCMV is a MP strain, an Armstrong strain, or an Armstrong Clone 13 strain. In other embodiments, the arenavirus particle is derived from a Lassa virus. In certain embodiments, the arenavirus particle is derived from a Pichinde virus (PICV). In certain embodiments, the arenavirus particle is derived from a Junin virus vaccine Candid #1, or a Junin virus vaccine XJ Clone 3 strain. In certain embodiments, the arenavirus particle is derived from an Oliveros virus. In certain embodiments, the arenavirus particle is derived from a Tamiami virus. In certain embodiments, the arenavirus particle is derived from a Mobala virus. In certain embodiments, the arenavirus particle is derived from a Mopeia virus. In certain embodiments, the arenavirus particle is derived from an Ippy virus. In certain embodiments, the arenavirus particle is derived from an Amapari virus. In certain embodiments, the arenavirus particle is derived from a Flexal virus. In certain embodiments, the arenavirus particle is derived from a Guanarito virus. In certain embodiments, the arenavirus particle is derived from a Latino virus. In certain embodiments, the arenavirus particle is derived from a Machupo virus. In certain embodiments, the arenavirus particle is derived from a Parana virus. In certain embodiments, the arenavirus particle is derived from a Pirital virus. In certain embodiments, the arenavirus particle is derived from a Sabia virus. In certain embodiments, the arenavirus particle is derived from a Tacaribe virus. In certain embodiments, the arenavirus particle is derived from a Bear Canyon virus. In certain embodiments, the arenavirus particle is derived from a Whitewater Arroyo virus. In certain embodiments, the arenavirus particle is derived from an Allpahuayo virus (ALLV). In certain embodiments, the arenavirus particle is derived from an Alxa virus. In certain embodiments, the arenavirus particle is derived from a Chapare virus. In certain embodiments, the arenavirus particle is derived from a Lijiang virus. In certain embodiments, the arenavirus particle is derived from a Cupixi virus. In certain embodiments, the arenavirus particle is derived from a Gairo virus. In certain embodiments, the arenavirus particle is derived from a Loei River virus. In certain embodiments, the arenavirus particle is derived from a Lujo virus. In certain embodiments, the arenavirus particle is derived from a Luna virus. In certain embodiments, the arenavirus particle is derived from a Luli virus. In certain embodiments, the arenavirus particle is derived from a Lunk virus. In certain embodiments, the arenavirus particle is derived from a Mariental virus. In certain embodiments, the arenavirus particle is derived from a Merino Walk virus. In certain embodiments, the arenavirus particle is derived from a Morogoro virus. In certain embodiments, the arenavirus particle is derived from an Okahandja virus. In certain embodiments, the arenavirus particle is derived from an Aporé virus. In certain embodiments, the arenavirus particle is derived from a Ryukyu virus. In certain embodiments, the arenavirus particle is derived from a Solwezi virus. In certain embodiments, the arenavirus particle is derived from a souris virus. In certain embodiments, the arenavirus particle is derived from a Wenzhou virus. In certain embodiments, the arenavirus particle is derived from a Big Brushy Tank virus. In certain embodiments, the arenavirus particle is derived from a Catarina virus. In certain embodiments, the arenavirus particle is derived from a Skinner Tank virus. In certain embodiments, the arenavirus particle is derived from a Tonto Creek virus. In certain embodiments, the arenavirus particle is derived from a Xapuri virus.

[0362] In certain embodiments, the growth or infectivity of the arenavirus particle comprising the nucleotide sequence described herein is not inferior to a second arenavirus particle carrying one or more of the same heterologous non-arenaviral polypeptides, and all arenaviral GP, NP, Z and L in the second arenavirus particle are each expressed as one ORF.

### 5.5.1 Arenaviral Open Reading Frame

[0363] In certain embodiments, the arenaviral ORF encodes a polypeptide selected from the group consisting of arenavirus GP, NP, Z, and L (see Section 5.1).

[0364] In certain embodiments, the arenaviral ORF encodes a polypeptide selected from the group consisting of arenavirus GP, NP, Z, and L, namely from the group consisting of arenavirus glycoprotein, nucleoprotein, Z protein, L protein, glycoprotein precursor, nucleoprotein precursor, Z protein precursor, and L protein precursor. In certain embodiments, the arenavirus GP, NP, Z, and L are wild-type. In other embodiments, the arenavirus GP, NP, Z, and L are recombinant. In certain embodiments, the arenavirus GP, NP, Z, and L are mutated. In certain embodiments, the arenavirus GP, NP, Z, and L are derived from an attenuated virus.

[0365] In certain embodiments, the arenaviral ORF encodes a polypeptide selected from the group consisting of wild-type arenavirus glycoprotein, nucleoprotein, Z protein, L protein, glycoprotein precursor, nucleoprotein precursor, Z protein precursor, and L protein precursor. In certain embodiments, the arenaviral ORF encodes a wild-type arenavirus glycoprotein precursor. In certain embodiments, the wild-type arenavirus glycoprotein precursor can be processed into a GP signal peptide, a GP1 and a GP2.

[0366] In certain embodiments, the arenaviral ORF encodes a polypeptide selected from the group consisting of recombinant arenavirus glycoprotein, nucleoprotein, Z protein, L protein, glycoprotein precursor, nucleoprotein precursor, Z protein precursor, and L protein precursor. In certain embodiments, the arenaviral ORF encodes a recombinant arenavirus glycoprotein precursor. In certain embodiments, the recombinant arenavirus glycoprotein precursor can be processed into a GP signal peptide, a GP1 and a GP2, one or more of which are recombinant.

[0367] In certain embodiments, the arenaviral ORF encodes a polypeptide selected from the group consisting of mutated arenavirus glycoprotein, nucleoprotein, Z protein, L protein, glycoprotein precursor, nucleoprotein precursor, Z protein precursor, and L protein precursor. In certain embodiments, the arenaviral ORF encodes a mutated arenavirus glycoprotein precursor. In certain embodiments, the mutated arenavirus glycoprotein precursor can be processed into a GP signal peptide, a GP1 and a GP2, one or more of which are mutated.

[0368] In certain embodiments, the arenaviral ORF encodes a polypeptide selected from the group consisting of arenavirus glycoprotein, nucleoprotein, Z protein, L protein, glycoprotein precursor, nucleoprotein precursor, Z protein precursor, and L protein precursor that are derived from an attenuated virus. In certain embodiments, the arenaviral ORF encodes arenavirus glycoprotein precursor derived from an attenuated virus. In certain embodiments, the arenavirus glycoprotein precursor derived from an attenuated virus can be processed into a GP signal peptide, a GP1 and a GP2, one or more of which are derived from an attenuated virus.

[0369] In certain embodiments, the arenaviral ORF encodes a polypeptide selected from the group consisting of GP, NP, Z and L of LCMV, Lassa virus, Pichinde virus, Oliveros virus, Tamiami virus, Mobala virus, Mopeia virus, Ippy virus, Amapari virus, Flexal virus, Guanarito virus, Latino virus, Machupo virus, Parana virus, Pirital virus, Sabia virus, Tacaribe virus, Bear Canyon virus, Whitewater Arroyo virus, Allpahuayo virus (ALLV), Alxa virus, Chapare virus, Lijiang virus, Cupixi virus, Gairo virus, Loei River virus, Lujo virus, Luna virus, Luli virus, Lunk virus, Mariental virus, Merino Walk virus, Morogoro virus, Okahandja virus, Aporé virus, Ryukyu virus, Solwezi virus, souris virus, Wenzhou virus, Big Brushy Tank virus, Catarina virus, Skinner Tank virus, Tonto Creek virus, Xapuri virus, or Junin virus.

[0370] In certain embodiments, the arenaviral ORF encodes a polypeptide comprising an amino acid sequence that is at least 80%, 85%, 90%, 95%, 96%, 97%, 98%, 99% or 100% identical to the amino acid sequence of SEQ ID NO:1, SEQ ID NO:2, SEQ ID NO:3, SEQ ID NO:4, SEQ ID NO:5, SEQ ID NO:6, SEQ ID NO:7, SEQ ID NO:8, SEQ ID NO:9, SEQ ID NO:10, SEQ ID NO: 11, SEQ ID NO:12, SEQ ID NO:13, SEQ ID NO:14, SEQ ID NO:15, SEQ ID NO:16, SEQ ID NO:17, SEQ ID NO:18, SEQ ID NO:19, SEQ ID NO:20, SEQ ID NO:21, SEQ ID NO:22, SEQ ID NO:23, SEQ ID NO:24, SEQ ID NO:48, SEQ ID NO:52, SEQ ID NO:59, SEQ ID NO:66, SEQ ID NO:73, SEQ ID NO:80, SEQ ID NO:84, SEQ ID NO:91, SEQ ID NO:98, SEQ ID NO:105, SEQ ID NO:109, SEQ ID NO:113, SEQ ID NO:120, SEQ ID NO:127, SEQ ID NO:134, SEQ ID NO:49, SEQ ID NO:56, SEQ ID NO:63, SEQ ID NO:70, SEQ ID NO:77, SEQ ID NO:81, SEQ ID NO:88, SEQ ID NO:95, SEQ ID NO:102, SEQ ID NO:106, SEQ ID NO:110, SEQ ID NO: 117, SEQ ID NO:124, SEQ ID NO:131, SEQ ID NO:138, SEQ ID NO:50, SEQ ID NO:57, SEQ ID NO:64, SEQ ID NO:71, SEQ ID NO:78, SEQ ID NO:82, SEQ ID NO:89, SEQ ID NO:96, SEQ ID NO:103, SEQ ID NO:107, SEQ ID NO:111, SEQ ID NO: 118, SEQ ID NO:125, SEQ ID NO:132, SEQ ID NO:139, SEQ ID NO:51, SEQ ID NO:58, SEQ ID NO:65, SEQ ID NO:72, SEQ ID NO:79, SEQ ID NO:83, SEQ ID NO:90, SEQ ID NO:97, SEQ ID NO:104, SEQ ID NO:108, SEQ ID NO: 112, SEQ ID NO: 119, SEQ ID NO:126, SEQ ID NO:133, or SEQ ID NO:140. In certain embodiments, the arenaviral ORF encodes a polypeptide comprising an amino acid sequence that is at least 80% identical to the amino acid sequence of SEQ ID NO:1, SEQ ID NO:2, SEQ ID NO:3, SEQ ID NO:4, SEQ ID NO:5, SEQ ID NO:6, SEQ ID NO:7, SEQ ID NO:8, SEQ ID NO:9, SEQ ID NO:10, SEQ ID NO:11, SEQ ID NO:12, SEQ ID NO:13, SEQ ID NO:14, SEQ ID NO:15, SEQ ID NO:16, SEQ ID NO:17, SEQ ID NO:18, SEQ ID NO:19, SEQ ID NO:20, SEQ ID NO:21, SEQ ID NO:22, SEQ ID NO:23, SEQ ID NO:24, SEQ ID NO:48, SEQ ID NO:52, SEQ ID NO:59, SEQ ID NO:66, SEQ ID NO:73, SEQ ID NO:80, SEQ ID NO:84, SEQ ID NO:91, SEQ ID NO:98, SEQ ID NO:105, SEQ ID NO:109, SEQ ID NO:113, SEQ ID NO:120, SEQ ID NO:127, SEQ ID NO:134, SEQ ID NO:49, SEQ ID NO:56, SEQ ID NO:63, SEQ ID NO:70, SEQ ID NO:77, SEQ ID NO:81, SEQ ID NO:88, SEQ ID NO:95, SEQ ID NO:102, SEQ ID NO:106, SEQ ID NO:110, SEQ ID NO: 117, SEQ ID NO:124, SEQ ID NO:131, SEQ ID NO:138, SEQ ID NO:50, SEQ ID NO:57, SEQ ID NO:64, SEQ ID NO:71, SEQ ID NO:78, SEQ ID NO:82, SEQ ID NO:89, SEQ ID NO:96, SEQ ID NO:103, SEQ ID NO:107, SEQ ID NO:111, SEQ ID NO: 118, SEQ ID NO:125, SEQ ID NO:132, SEQ ID NO:139, SEQ ID NO:51, SEQ ID NO:58, SEQ ID NO:65, SEQ ID NO:72, SEQ ID NO:79, SEQ ID NO:83, SEQ ID NO:90, SEQ ID NO:97, SEQ ID NO:104, SEQ ID NO:108, SEQ ID NO: 112, SEQ ID NO: 119, SEQ ID NO:126, SEQ ID NO:133, or SEQ ID NO:140. In certain embodiments, the arenaviral ORF encodes a polypeptide comprising an amino acid sequence that is at least 85% identical to the amino acid sequence of SEQ ID NO:1, SEQ ID NO:2, SEQ ID NO:3, SEQ ID NO:4, SEQ ID NO:5, SEQ ID NO:6, SEQ ID NO:7, SEQ ID NO:8, SEQ ID NO:9, SEQ ID NO:10, SEQ ID NO: 11, SEQ ID NO:12, SEQ ID NO:13, SEQ ID NO:14, SEQ ID NO:15, SEQ ID NO:16, SEQ ID NO:17, SEQ ID NO:18, SEQ ID NO:19, SEQ ID NO:20, SEQ ID NO:21, SEQ ID NO:22, SEQ ID NO:23, SEQ ID NO:24, SEQ ID NO:48, SEQ ID NO:52, SEQ ID NO:59, SEQ ID NO:66, SEQ ID NO:73, SEQ ID NO:80, SEQ ID NO:84, SEQ ID NO:91, SEQ ID NO:98, SEQ ID NO:105, SEQ ID NO:109, SEQ ID NO: 113, SEQ ID NO:120, SEQ ID NO:127, SEQ ID NO:134, SEQ ID NO:49, SEQ ID NO:56, SEQ ID NO:63, SEQ ID NO:70, SEQ ID NO:77, SEQ ID NO:81, SEQ ID NO:88, SEQ ID NO:95, SEQ ID NO:102, SEQ ID NO:106, SEQ ID NO:110, SEQ ID NO: 117, SEQ ID NO:124, SEQ ID NO:131, SEQ ID NO:138, SEQ ID NO:50, SEQ ID NO:57, SEQ ID NO:64, SEQ ID NO:71, SEQ ID NO:78, SEQ ID NO:82, SEQ ID NO:89, SEQ ID NO:96, SEQ ID NO:103, SEQ ID NO:107, SEQ ID NO:111, SEQ ID NO: 118, SEQ ID NO:125, SEQ ID NO:132, SEQ ID NO:139, SEQ ID NO:51, SEQ ID NO:58, SEQ ID NO:65, SEQ ID NO:72, SEQ ID NO:79, SEQ ID NO:83, SEQ ID NO:90, SEQ ID NO:97, SEQ ID NO:104, SEQ ID NO:108, SEQ ID NO: 112, SEQ ID NO: 119, SEQ ID NO:126, SEQ ID NO:133, or SEQ ID NO:140. In certain embodiments, the arenaviral ORF encodes a polypeptide comprising an amino acid sequence that is at least 90% identical to the amino acid sequence of SEQ ID NO:1, SEQ ID NO:2, SEQ ID NO:3, SEQ ID NO:4, SEQ ID NO:5, SEQ ID NO:6, SEQ ID NO:7, SEQ ID NO:8, SEQ ID NO:9, SEQ ID NO:10, SEQ ID NO:11, SEQ ID NO:12, SEQ ID NO:13, SEQ ID NO:14, SEQ ID NO:15, SEQ ID NO:16, SEQ ID NO:17, SEQ ID NO:18, SEQ ID NO:19, SEQ ID NO:20, SEQ ID NO:21, SEQ ID NO:22, SEQ ID NO:23, SEQ ID NO:24, SEQ ID NO:48, SEQ ID NO:52, SEQ ID NO:59, SEQ ID NO:66, SEQ ID NO:73, SEQ ID NO:80, SEQ ID NO:84, SEQ ID NO:91, SEQ ID NO:98, SEQ ID NO:105, SEQ ID NO:109, SEQ ID NO: 113, SEQ ID NO:120, SEQ ID NO:127, SEQ ID NO:134, SEQ ID NO:49, SEQ ID NO:56, SEQ ID NO:63, SEQ ID NO:70, SEQ ID NO:77, SEQ ID NO:81, SEQ ID NO:88, SEQ ID NO:95, SEQ ID NO:102, SEQ ID NO:106, SEQ ID NO:110, SEQ ID NO:117, SEQ ID NO:124, SEQ ID NO:131, SEQ ID NO:138, SEQ ID NO:50, SEQ ID NO:57, SEQ ID NO:64, SEQ ID NO:71, SEQ ID NO:78, SEQ ID NO:82, SEQ ID NO:89, SEQ ID NO:96, SEQ ID NO:103, SEQ ID NO:107, SEQ ID NO:111, SEQ ID NO: 118, SEQ ID NO:125, SEQ ID NO:132, SEQ ID NO:139, SEQ ID NO:51, SEQ ID NO:58, SEQ ID NO:65, SEQ ID NO:72, SEQ ID NO:79, SEQ ID NO:83, SEQ ID NO:90, SEQ ID NO:97, SEQ ID NO:104, SEQ ID NO:108, SEQ ID NO: 112, SEQ ID NO: 119, SEQ ID NO:126, SEQ ID NO:133, or SEQ ID NO:140. In certain embodiments, the arenaviral ORF encodes a polypeptide comprising an amino acid sequence that is at least 95% identical to the amino acid sequence of SEQ ID NO:1, SEQ ID NO:2, SEQ ID NO:3, SEQ ID NO:4, SEQ ID NO:5, SEQ ID NO:6, SEQ ID NO:7, SEQ ID NO:8, SEQ ID NO:9, SEQ ID NO:10, SEQ ID NO: 11, SEQ ID NO:12, SEQ ID NO:13, SEQ ID NO:14, SEQ ID NO:15, SEQ ID NO:16, SEQ ID NO:17, SEQ ID NO:18, SEQ ID NO:19, SEQ ID NO:20, SEQ ID NO:21, SEQ ID NO:22, SEQ ID NO:23, SEQ ID NO:24, SEQ ID NO:48, SEQ ID NO:52, SEQ ID NO:59, SEQ ID NO:66, SEQ ID NO:73, SEQ ID NO:80, SEQ ID NO:84, SEQ ID NO:91, SEQ ID NO:98, SEQ ID NO:105, SEQ ID NO:109, SEQ ID NO:113, SEQ ID NO:120, SEQ ID NO:127, SEQ ID NO:134, SEQ ID NO:49, SEQ ID NO:56, SEQ ID NO:63, SEQ ID NO:70, SEQ ID NO:77, SEQ ID NO:81, SEQ ID NO:88, SEQ ID NO:95, SEQ ID NO:102, SEQ ID NO:106, SEQ ID NO:110, SEQ ID NO: 117, SEQ ID NO:124, SEQ ID NO:131, SEQ ID NO:138, SEQ ID NO:50, SEQ ID NO:57, SEQ ID NO:64, SEQ ID NO:71, SEQ ID NO:78, SEQ ID NO:82, SEQ ID NO:89, SEQ ID NO:96, SEQ ID NO:103, SEQ ID NO:107, SEQ ID NO:111, SEQ ID NO: 118, SEQ ID NO:125, SEQ ID NO:132, SEQ ID NO:139, SEQ ID NO:51, SEQ ID NO:58, SEQ ID NO:65, SEQ ID NO:72, SEQ ID NO:79, SEQ ID NO:83, SEQ ID NO:90, SEQ ID NO:97, SEQ ID NO:104, SEQ ID NO:108, SEQ ID NO: 112, SEQ ID NO: 119, SEQ ID NO:126, SEQ ID NO:133, or SEQ ID NO:140. In certain embodiments, the arenaviral ORF encodes a polypeptide comprising an amino acid sequence that is at least 96% identical to the amino acid sequence of SEQ ID NO:1, SEQ ID NO:2, SEQ ID NO:3, SEQ ID NO:4, SEQ ID NO:5, SEQ ID NO:6, SEQ ID NO:7, SEQ ID NO:8, SEQ ID NO:9, SEQ ID NO:10, SEQ ID NO: 11, SEQ ID NO:12, SEQ ID NO:13, SEQ ID NO:14, SEQ ID NO:15, SEQ ID NO:16, SEQ ID NO:17, SEQ ID NO:18, SEQ ID NO:19, SEQ ID NO:20, SEQ ID NO:21, SEQ ID NO:22, SEQ ID NO:23, SEQ ID NO:24, SEQ ID NO:48, SEQ ID NO:52, SEQ ID NO:59, SEQ ID NO:66, SEQ ID NO:73, SEQ ID NO:80, SEQ ID NO:84, SEQ ID NO:91, SEQ ID NO:98, SEQ ID NO:105, SEQ ID NO:109, SEQ ID NO: 113, SEQ ID NO:120, SEQ ID NO:127, SEQ ID NO:134, SEQ ID NO:49, SEQ ID NO:56, SEQ ID NO:63, SEQ ID NO:70, SEQ ID NO:77, SEQ ID NO:81, SEQ ID NO:88, SEQ ID NO:95, SEQ ID NO:102, SEQ ID NO:106, SEQ ID NO:110, SEQ ID NO: 117, SEQ ID NO:124, SEQ ID NO:131, SEQ ID NO:138, SEQ ID NO:50, SEQ ID NO:57, SEQ ID NO:64, SEQ ID NO:71, SEQ ID NO:78, SEQ ID NO:82, SEQ ID NO:89, SEQ ID NO:96, SEQ ID NO:103, SEQ ID NO:107, SEQ ID NO:111, SEQ ID NO: 118, SEQ ID NO:125, SEQ ID NO:132, SEQ ID NO:139, SEQ ID NO:51, SEQ ID NO:58, SEQ ID NO:65, SEQ ID NO:72, SEQ ID NO:79, SEQ ID NO:83, SEQ ID NO:90, SEQ ID NO:97, SEQ ID NO:104, SEQ ID NO:108, SEQ ID NO: 112, SEQ ID NO: 119, SEQ ID NO:126, SEQ ID NO:133, or SEQ ID NO:140. In certain embodiments, the arenaviral ORF encodes a polypeptide comprising an amino acid sequence that is at least 97% identical to the amino acid sequence of SEQ ID NO:1, SEQ ID NO:2, SEQ ID NO:3, SEQ ID NO:4, SEQ ID NO:5, SEQ ID NO:6, SEQ ID NO:7, SEQ ID NO:8, SEQ ID NO:9, SEQ ID NO:10, SEQ ID NO:11, SEQ ID NO:12, SEQ ID NO:13, SEQ ID NO:14, SEQ ID NO:15, SEQ ID NO:16, SEQ ID NO:17, SEQ ID NO:18, SEQ ID NO:19, SEQ ID NO:20, SEQ ID NO:21, SEQ ID NO:22, SEQ ID NO:23, SEQ ID NO:24, SEQ ID NO:48, SEQ ID NO:52, SEQ ID NO:59, SEQ ID NO:66, SEQ ID NO:73, SEQ ID NO:80, SEQ ID NO:84, SEQ ID NO:91, SEQ ID NO:98, SEQ ID NO:105, SEQ ID NO:109, SEQ ID NO: 113, SEQ ID NO:120, SEQ ID NO:127, SEQ ID NO:134, SEQ ID NO:49, SEQ ID NO:56, SEQ ID NO:63, SEQ ID NO:70, SEQ ID NO:77, SEQ ID NO:81, SEQ ID NO:88, SEQ ID NO:95, SEQ ID NO:102, SEQ ID NO:106, SEQ ID NO:110, SEQ ID NO:117, SEQ ID NO:124, SEQ ID NO:131, SEQ ID NO:138, SEQ ID NO:50, SEQ ID NO:57, SEQ ID NO:64, SEQ ID NO:71, SEQ ID NO:78, SEQ ID NO:82, SEQ ID NO:89, SEQ ID NO:96, SEQ ID NO:103, SEQ ID NO:107, SEQ ID NO:111, SEQ ID NO: 118, SEQ ID NO:125, SEQ ID NO:132, SEQ ID NO:139, SEQ ID NO:51, SEQ ID NO:58, SEQ ID NO:65, SEQ ID NO:72, SEQ ID NO:79, SEQ ID NO:83, SEQ ID NO:90, SEQ ID NO:97, SEQ ID NO:104, SEQ ID NO:108, SEQ ID NO: 112, SEQ ID NO: 119, SEQ ID NO:126, SEQ ID NO:133, or SEQ ID NO:140. In certain embodiments, the arenaviral ORF encodes a polypeptide comprising an amino acid sequence that is at least 98% identical to the amino acid sequence of SEQ ID NO:1, SEQ ID NO:2, SEQ ID NO:3, SEQ ID NO:4, SEQ ID NO:5, SEQ ID NO:6, SEQ ID NO:7, SEQ ID NO:8, SEQ ID NO:9, SEQ ID NO:10, SEQ ID NO: 11, SEQ ID NO:12, SEQ ID NO:13, SEQ ID NO:14, SEQ ID NO:15, SEQ ID NO:16, SEQ ID NO:17, SEQ ID NO:18, SEQ ID NO:19, SEQ ID NO:20, SEQ ID NO:21, SEQ ID NO:22, SEQ ID NO:23, SEQ ID NO:24, SEQ ID NO:48, SEQ ID NO:52, SEQ ID NO:59, SEQ ID NO:66, SEQ ID NO:73, SEQ ID NO:80, SEQ ID NO:84, SEQ ID NO:91, SEQ ID NO:98, SEQ ID NO:105, SEQ ID NO:109, SEQ ID NO:113, SEQ ID NO:120, SEQ ID NO:127, SEQ ID NO:134, SEQ ID NO:49, SEQ ID NO:56, SEQ ID NO:63, SEQ ID NO:70, SEQ ID NO:77, SEQ ID NO:81, SEQ ID NO:88, SEQ ID NO:95, SEQ ID NO:102, SEQ ID NO:106, SEQ ID NO:110, SEQ ID NO: 117, SEQ ID NO:124, SEQ ID NO:131, SEQ ID NO:138, SEQ ID NO:50, SEQ ID NO:57, SEQ ID NO:64, SEQ ID NO:71, SEQ ID NO:78, SEQ ID NO:82, SEQ ID NO:89, SEQ ID NO:96, SEQ ID NO:103, SEQ ID NO:107, SEQ ID NO:111, SEQ ID NO: 118, SEQ ID NO:125, SEQ ID NO:132, SEQ ID NO:139, SEQ ID NO:51, SEQ ID NO:58, SEQ ID NO:65, SEQ ID NO:72, SEQ ID NO:79, SEQ ID NO:83, SEQ ID NO:90, SEQ ID NO:97, SEQ ID NO:104, SEQ ID NO:108, SEQ ID NO: 112, SEQ ID NO: 119, SEQ ID NO:126, SEQ ID NO:133, or SEQ ID NO:140. In certain embodiments, the arenaviral ORF encodes a polypeptide comprising an amino acid sequence that is at least 99% identical to the amino acid sequence of SEQ ID NO:1, SEQ ID NO:2, SEQ ID NO:3, SEQ ID NO:4, SEQ ID NO:5, SEQ ID NO:6, SEQ ID NO:7, SEQ ID NO:8, SEQ ID NO:9, SEQ ID NO:10, SEQ ID NO: 11, SEQ ID NO:12, SEQ ID NO:13, SEQ ID NO:14, SEQ ID NO:15, SEQ ID NO:16, SEQ ID NO:17, SEQ ID NO:18, SEQ ID NO:19, SEQ ID NO:20, SEQ ID NO:21, SEQ ID NO:22, SEQ ID NO:23, SEQ ID NO:24, SEQ ID NO:48, SEQ ID NO:52, SEQ ID NO:59, SEQ ID NO:66, SEQ ID NO:73, SEQ ID NO:80, SEQ ID NO:84, SEQ ID NO:91, SEQ ID NO:98, SEQ ID NO:105, SEQ ID NO:109, SEQ ID NO: 113, SEQ ID NO:120, SEQ ID NO:127, SEQ ID NO:134, SEQ ID NO:49, SEQ ID NO:56, SEQ ID NO:63, SEQ ID NO:70, SEQ ID NO:77, SEQ ID NO:81, SEQ ID NO:88, SEQ ID NO:95, SEQ ID NO:102, SEQ ID NO:106, SEQ ID NO:110, SEQ ID NO: 117, SEQ ID NO:124, SEQ ID NO:131, SEQ ID NO:138, SEQ ID NO:50, SEQ ID NO:57, SEQ ID NO:64, SEQ ID NO:71, SEQ ID NO:78, SEQ ID NO:82, SEQ ID NO:89, SEQ ID NO:96, SEQ ID NO:103, SEQ ID NO:107, SEQ ID NO:111, SEQ ID NO: 118, SEQ ID NO:125, SEQ ID NO:132, SEQ ID NO:139, SEQ ID NO:51, SEQ ID NO:58, SEQ ID NO:65, SEQ ID NO:72, SEQ ID NO:79, SEQ ID NO:83, SEQ ID NO:90, SEQ ID NO:97, SEQ ID NO:104, SEQ ID NO:108, SEQ ID NO: 112, SEQ ID NO: 119, SEQ ID NO:126, SEQ ID NO:133, or SEQ ID NO:140. In certain embodiments, the arenaviral ORF encodes a polypeptide comprising an amino acid sequence that is 100% identical to the amino acid sequence of SEQ ID NO:1, SEQ ID NO:2, SEQ ID NO:3, SEQ ID NO:4, SEQ ID NO:5, SEQ ID NO:6, SEQ ID NO:7, SEQ ID NO:8, SEQ ID NO:9, SEQ ID NO:10, SEQ ID NO: 11, SEQ ID NO:12, SEQ ID NO:13, SEQ ID NO:14, SEQ ID NO:15, SEQ ID NO:16, SEQ ID NO:17, SEQ ID NO:18, SEQ ID NO:19, SEQ ID NO:20, SEQ ID NO:21, SEQ ID NO:22, SEQ ID NO:23, SEQ ID NO:24, SEQ ID NO:48, SEQ ID NO:52, SEQ ID NO:59, SEQ ID NO:66, SEQ ID NO:73, SEQ ID NO:80, SEQ ID NO:84, SEQ ID NO:91, SEQ ID NO:98, SEQ ID NO:105, SEQ ID NO:109, SEQ ID NO:113, SEQ ID NO:120, SEQ ID NO:127, SEQ ID NO:134, SEQ ID NO:49, SEQ ID NO:56, SEQ ID NO:63, SEQ ID NO:70, SEQ ID NO:77, SEQ ID NO:81, SEQ ID NO:88, SEQ ID NO:95, SEQ ID NO:102, SEQ ID NO:106, SEQ ID NO:110, SEQ ID NO:117, SEQ ID NO:124, SEQ ID NO:131, SEQ ID NO:138, SEQ ID NO:50, SEQ ID NO:57, SEQ ID NO:64, SEQ ID NO:71, SEQ ID NO:78, SEQ ID NO:82, SEQ ID NO:89, SEQ ID NO:96, SEQ ID NO:103, SEQ ID NO:107, SEQ ID NO:111, SEQ ID NO: 118, SEQ ID NO:125, SEQ ID NO:132, SEQ ID NO:139, SEQ ID NO:51, SEQ ID NO:58, SEQ ID NO:65, SEQ ID NO:72, SEQ ID NO:79, SEQ ID NO:83, SEQ ID NO:90, SEQ ID NO:97, SEQ ID NO:104, SEQ ID NO:108, SEQ ID NO:112, SEQ ID NO:119, SEQ ID NO:126, SEQ ID NO:133, or SEQ ID NO:140. In certain embodiments, the arenaviral ORF encodes a polypeptide comprising an amino acid sequence that is 80% identical to the amino acid sequence of SEQ ID NO:1, SEQ ID NO:2, SEQ ID NO:3, SEQ ID NO:4, SEQ ID NO:5, SEQ ID NO:6, SEQ ID NO:7, SEQ ID NO:8, SEQ ID NO:9, SEQ ID NO:10, SEQ ID NO: 11, SEQ ID NO:12, SEQ ID NO:13, SEQ ID NO:14, SEQ ID NO:15, SEQ ID NO:16, SEQ ID NO:17, SEQ ID NO:18, SEQ ID NO:19, SEQ ID NO:20, SEQ ID NO:21, SEQ ID NO:22, SEQ ID NO:23, SEQ ID NO:24, SEQ ID NO:48, SEQ ID NO:52, SEQ ID NO:59, SEQ ID NO:66, SEQ ID NO:73, SEQ ID NO:80, SEQ ID NO:84, SEQ ID NO:91, SEQ ID NO:98, SEQ ID NO:105, SEQ ID NO:109, SEQ ID NO:113, SEQ ID NO:120, SEQ ID NO:127, SEQ ID NO:134, SEQ ID NO:49, SEQ ID NO:56, SEQ ID NO:63, SEQ ID NO:70, SEQ ID NO:77, SEQ ID NO:81, SEQ ID NO:88, SEQ ID NO:95, SEQ ID NO:102, SEQ ID NO:106, SEQ ID NO:110, SEQ ID NO: 117, SEQ ID NO:124, SEQ ID NO:131, SEQ ID NO:138, SEQ ID NO:50, SEQ ID NO:57, SEQ ID NO:64, SEQ ID NO:71, SEQ ID NO:78, SEQ ID NO:82, SEQ ID NO:89, SEQ ID NO:96, SEQ ID NO:103, SEQ ID NO:107, SEQ ID NO:111, SEQ ID NO: 118, SEQ ID NO:125, SEQ ID NO:132, SEQ ID NO:139, SEQ ID NO:51, SEQ ID NO:58, SEQ ID NO:65, SEQ ID NO:72, SEQ ID NO:79, SEQ ID NO:83, SEQ ID NO:90, SEQ ID NO:97, SEQ ID NO:104, SEQ ID NO:108, SEQ ID NO: 112, SEQ ID NO: 119, SEQ ID NO:126, SEQ ID NO:133, or SEQ ID NO:140. In certain embodiments, the arenaviral ORF encodes a polypeptide comprising an amino acid sequence that is 85% identical to the amino acid sequence of SEQ ID NO:1, SEQ ID NO:2, SEQ ID NO:3, SEQ ID NO:4, SEQ ID NO:5, SEQ ID NO:6, SEQ ID NO:7, SEQ ID NO:8, SEQ ID NO:9, SEQ ID NO:10, SEQ ID NO: 11, SEQ ID NO:12, SEQ ID NO:13, SEQ ID NO:14, SEQ ID NO:15, SEQ ID NO:16, SEQ ID NO:17, SEQ ID NO:18, SEQ ID NO:19, SEQ ID NO:20, SEQ ID NO:21, SEQ ID NO:22, SEQ ID NO:23, SEQ ID NO:24, SEQ ID NO:48, SEQ ID NO:52, SEQ ID NO:59, SEQ ID NO:66, SEQ ID NO:73, SEQ ID NO:80, SEQ ID NO:84, SEQ ID NO:91, SEQ ID NO:98, SEQ ID NO:105, SEQ ID NO:109, SEQ ID NO:113, SEQ ID NO:120, SEQ ID NO:127, SEQ ID NO:134, SEQ ID NO:49, SEQ ID NO:56, SEQ ID NO:63, SEQ ID NO:70, SEQ ID NO:77, SEQ ID NO:81, SEQ ID NO:88, SEQ ID NO:95, SEQ ID NO:102, SEQ ID NO:106, SEQ ID NO:110, SEQ ID NO: 117, SEQ ID NO:124, SEQ ID NO:131, SEQ ID NO:138, SEQ ID NO:50, SEQ ID NO:57, SEQ ID NO:64, SEQ ID NO:71, SEQ ID NO:78, SEQ ID NO:82, SEQ ID NO:89, SEQ ID NO:96, SEQ ID NO:103, SEQ ID NO:107, SEQ ID NO:111, SEQ ID NO: 118, SEQ ID NO:125, SEQ ID NO:132, SEQ ID NO:139, SEQ ID NO:51, SEQ ID NO:58, SEQ ID NO:65, SEQ ID NO:72, SEQ ID NO:79, SEQ ID NO:83, SEQ ID NO:90, SEQ ID NO:97, SEQ ID NO:104, SEQ ID NO:108, SEQ ID NO: 112, SEQ ID NO: 119, SEQ ID NO:126, SEQ ID NO:133, or SEQ ID NO:140. In certain embodiments, the arenaviral ORF encodes a polypeptide comprising an amino acid sequence that is 90% identical to the amino acid sequence of SEQ ID NO:1, SEQ ID NO:2, SEQ ID NO:3, SEQ ID NO:4, SEQ ID NO:5, SEQ ID NO:6, SEQ ID NO:7, SEQ ID NO:8, SEQ ID NO:9, SEQ ID NO:10, SEQ ID NO: 11, SEQ ID NO:12, SEQ ID NO:13, SEQ ID NO:14, SEQ ID NO:15, SEQ ID NO:16, SEQ ID NO:17, SEQ ID NO:18, SEQ ID NO:19, SEQ ID NO:20, SEQ ID NO:21, SEQ ID NO:22, SEQ ID NO:23, SEQ ID NO:24, SEQ ID NO:48, SEQ ID NO:52, SEQ ID NO:59, SEQ ID NO:66, SEQ ID NO:73, SEQ ID NO:80, SEQ ID NO:84, SEQ ID NO:91, SEQ ID NO:98, SEQ ID NO:105, SEQ ID NO:109, SEQ ID NO: 113, SEQ ID NO:120, SEQ ID NO:127, SEQ ID NO:134, SEQ ID NO:49, SEQ ID NO:56, SEQ ID NO:63, SEQ ID NO:70, SEQ ID NO:77, SEQ ID NO:81, SEQ ID NO:88, SEQ ID NO:95, SEQ ID NO:102, SEQ ID NO:106, SEQ ID NO:110, SEQ ID NO: 117, SEQ ID NO:124, SEQ ID NO:131, SEQ ID NO:138, SEQ ID NO:50, SEQ ID NO:57, SEQ ID NO:64, SEQ ID NO:71, SEQ ID NO:78, SEQ ID NO:82, SEQ ID NO:89, SEQ ID NO:96, SEQ ID NO:103, SEQ ID NO:107, SEQ ID NO:111, SEQ ID NO: 118, SEQ ID NO:125, SEQ ID NO:132, SEQ ID NO:139, SEQ ID NO:51, SEQ ID NO:58, SEQ ID NO:65, SEQ ID NO:72, SEQ ID NO:79, SEQ ID NO:83, SEQ ID NO:90, SEQ ID NO:97, SEQ ID NO:104, SEQ ID NO:108, SEQ ID NO: 112, SEQ ID NO: 119, SEQ ID NO:126, SEQ ID NO:133, or SEQ ID NO:140. In certain embodiments, the arenaviral ORF encodes a polypeptide comprising an amino acid sequence that is 95% identical to the amino acid sequence of SEQ ID NO:1, SEQ ID NO:2, SEQ ID NO:3, SEQ ID NO:4, SEQ ID NO:5, SEQ ID NO:6, SEQ ID NO:7, SEQ ID NO:8, SEQ ID NO:9, SEQ ID NO:10, SEQ ID NO: 11, SEQ ID NO:12, SEQ ID NO:13, SEQ ID NO:14, SEQ ID NO:15, SEQ ID NO:16, SEQ ID NO:17, SEQ ID NO:18, SEQ ID NO:19, SEQ ID NO:20, SEQ ID NO:21, SEQ ID NO:22, SEQ ID NO:23, SEQ ID NO:24, SEQ ID NO:48, SEQ ID NO:52, SEQ ID NO:59, SEQ ID NO:66, SEQ ID NO:73, SEQ ID NO:80, SEQ ID NO:84, SEQ ID NO:91, SEQ ID NO:98, SEQ ID NO:105, SEQ ID NO:109, SEQ ID NO:113, SEQ ID NO:120, SEQ ID NO:127, SEQ ID NO:134, SEQ ID NO:49, SEQ ID NO:56, SEQ ID NO:63, SEQ ID NO:70, SEQ ID NO:77, SEQ ID NO:81, SEQ ID NO:88, SEQ ID NO:95, SEQ ID NO:102, SEQ ID NO:106, SEQ ID NO:110, SEQ ID NO:117, SEQ ID NO:124, SEQ ID NO:131, SEQ ID NO:138, SEQ ID NO:50, SEQ ID NO:57, SEQ ID NO:64, SEQ ID NO:71, SEQ ID NO:78, SEQ ID NO:82, SEQ ID NO:89, SEQ ID NO:96, SEQ ID NO:103, SEQ ID NO:107, SEQ ID NO:111, SEQ ID NO: 118, SEQ ID NO:125, SEQ ID NO:132, SEQ ID NO:139, SEQ ID NO:51, SEQ ID NO:58, SEQ ID NO:65, SEQ ID NO:72, SEQ ID NO:79, SEQ ID NO:83, SEQ ID NO:90, SEQ ID NO:97, SEQ ID NO:104, SEQ ID NO:108, SEQ ID NO:112, SEQ ID NO:119, SEQ ID NO:126, SEQ ID NO:133, or SEQ ID NO:140. In certain embodiments, the arenaviral ORF encodes a polypeptide comprising an amino acid sequence that is 96% identical to the amino acid sequence of SEQ ID NO:1, SEQ ID NO:2, SEQ ID NO:3, SEQ ID NO:4, SEQ ID NO:5, SEQ ID NO:6, SEQ ID NO:7, SEQ ID NO:8, SEQ ID NO:9, SEQ ID NO:10, SEQ ID NO: 11, SEQ ID NO:12, SEQ ID NO:13, SEQ ID NO:14, SEQ ID NO:15, SEQ ID NO:16, SEQ ID NO:17, SEQ ID NO:18, SEQ ID NO:19, SEQ ID NO:20, SEQ ID NO:21, SEQ ID NO:22, SEQ ID NO:23, SEQ ID NO:24, SEQ ID NO:48, SEQ ID NO:52, SEQ ID NO:59, SEQ ID NO:66, SEQ ID NO:73, SEQ ID NO:80, SEQ ID NO:84, SEQ ID NO:91, SEQ ID NO:98, SEQ ID NO:105, SEQ ID NO:109, SEQ ID NO:113, SEQ ID NO:120, SEQ ID NO:127, SEQ ID NO:134, SEQ ID NO:49, SEQ ID NO:56, SEQ ID NO:63, SEQ ID NO:70, SEQ ID NO:77, SEQ ID NO:81, SEQ ID NO:88, SEQ ID NO:95, SEQ ID NO:102, SEQ ID NO:106, SEQ ID NO:110, SEQ ID NO: 117, SEQ ID NO:124, SEQ ID NO:131, SEQ ID NO:138, SEQ ID NO:50, SEQ ID NO:57, SEQ ID NO:64, SEQ ID NO:71, SEQ ID NO:78, SEQ ID NO:82, SEQ ID NO:89, SEQ ID NO:96, SEQ ID NO:103, SEQ ID NO:107, SEQ ID NO:111, SEQ ID NO: 118, SEQ ID NO:125, SEQ ID NO:132, SEQ ID NO:139, SEQ ID NO:51, SEQ ID NO:58, SEQ ID NO:65, SEQ ID NO:72, SEQ ID NO:79, SEQ ID NO:83, SEQ ID NO:90, SEQ ID NO:97, SEQ ID NO:104, SEQ ID NO:108, SEQ ID NO: 112, SEQ ID NO: 119, SEQ ID NO:126, SEQ ID NO:133, or SEQ ID NO:140. In certain embodiments, the arenaviral ORF encodes a polypeptide comprising an amino acid sequence that is 97% identical to the amino acid sequence of SEQ ID NO:1, SEQ ID NO:2, SEQ ID NO:3, SEQ ID NO:4, SEQ ID NO:5, SEQ ID NO:6, SEQ ID NO:7, SEQ ID NO:8, SEQ ID NO:9, SEQ ID NO:10, SEQ ID NO: 11, SEQ ID NO:12, SEQ ID NO:13, SEQ ID NO:14, SEQ ID NO:15, SEQ ID NO:16, SEQ ID NO:17, SEQ ID NO:18, SEQ ID NO:19, SEQ ID NO:20, SEQ ID NO:21, SEQ ID NO:22, SEQ ID NO:23, SEQ ID NO:24, SEQ ID NO:48, SEQ ID NO:52, SEQ ID NO:59, SEQ ID NO:66, SEQ ID NO:73, SEQ ID NO:80, SEQ ID NO:84, SEQ ID NO:91, SEQ ID NO:98, SEQ ID NO:105, SEQ ID NO:109, SEQ ID NO:113, SEQ ID NO:120, SEQ ID NO:127, SEQ ID NO:134, SEQ ID NO:49, SEQ ID NO:56, SEQ ID NO:63, SEQ ID NO:70, SEQ ID NO:77, SEQ ID NO:81, SEQ ID NO:88, SEQ ID NO:95, SEQ ID NO:102, SEQ ID NO:106, SEQ ID NO:110, SEQ ID NO: 117, SEQ ID NO:124, SEQ ID NO:131, SEQ ID NO:138, SEQ ID NO:50, SEQ ID NO:57, SEQ ID NO:64, SEQ ID NO:71, SEQ ID NO:78, SEQ ID NO:82, SEQ ID NO:89, SEQ ID NO:96, SEQ ID NO:103, SEQ ID NO:107, SEQ ID NO:111, SEQ ID NO: 118, SEQ ID NO:125, SEQ ID NO:132, SEQ ID NO:139, SEQ ID NO:51, SEQ ID NO:58, SEQ ID NO:65, SEQ ID NO:72, SEQ ID NO:79, SEQ ID NO:83, SEQ ID NO:90, SEQ ID NO:97, SEQ ID NO:104, SEQ ID NO:108, SEQ ID NO: 112, SEQ ID NO: 119, SEQ ID NO:126, SEQ ID NO:133, or SEQ ID NO:140. In certain embodiments, the arenaviral ORF encodes a polypeptide comprising an amino acid sequence that is 98% identical to the amino acid sequence of SEQ ID NO:1, SEQ ID NO:2, SEQ ID NO:3, SEQ ID NO:4, SEQ ID NO:5, SEQ ID NO:6, SEQ ID NO:7, SEQ ID NO:8, SEQ ID NO:9, SEQ ID NO:10, SEQ ID NO: 11, SEQ ID NO:12, SEQ ID NO:13, SEQ ID NO:14, SEQ ID NO:15, SEQ ID NO:16, SEQ ID NO:17, SEQ ID NO:18, SEQ ID NO:19, SEQ ID NO:20, SEQ ID NO:21, SEQ ID NO:22, SEQ ID NO:23, SEQ ID NO:24, SEQ ID NO:48, SEQ ID NO:52, SEQ ID NO:59, SEQ ID NO:66, SEQ ID NO:73, SEQ ID NO:80, SEQ ID NO:84, SEQ ID NO:91, SEQ ID NO:98, SEQ ID NO:105, SEQ ID NO:109, SEQ ID NO: 113, SEQ ID NO:120, SEQ ID NO:127, SEQ ID NO:134, SEQ ID NO:49, SEQ ID NO:56, SEQ ID NO:63, SEQ ID NO:70, SEQ ID NO:77, SEQ ID NO:81, SEQ ID NO:88, SEQ ID NO:95, SEQ ID NO:102, SEQ ID NO:106, SEQ ID NO:110, SEQ ID NO: 117, SEQ ID NO:124, SEQ ID NO:131, SEQ ID NO:138, SEQ ID NO:50, SEQ ID NO:57, SEQ ID NO:64, SEQ ID NO:71, SEQ ID NO:78, SEQ ID NO:82, SEQ ID NO:89, SEQ ID NO:96, SEQ ID NO:103, SEQ ID NO:107, SEQ ID NO:111, SEQ ID NO: 118, SEQ ID NO:125, SEQ ID NO:132, SEQ ID NO:139, SEQ ID NO:51, SEQ ID NO:58, SEQ ID NO:65, SEQ ID NO:72, SEQ ID NO:79, SEQ ID NO:83, SEQ ID NO:90, SEQ ID NO:97, SEQ ID NO:104, SEQ ID NO:108, SEQ ID NO: 112, SEQ ID NO: 119, SEQ ID NO:126, SEQ ID NO:133, or SEQ ID NO:140. In certain embodiments, the arenaviral ORF encodes a polypeptide comprising an amino acid sequence that is 99% identical to the amino acid sequence of SEQ ID NO:1, SEQ ID NO:2, SEQ ID NO:3, SEQ ID NO:4, SEQ ID NO:5, SEQ ID NO:6, SEQ ID NO:7, SEQ ID NO:8, SEQ ID NO:9, SEQ ID NO:10, SEQ ID NO: 11, SEQ ID NO:12, SEQ ID NO:13, SEQ ID NO:14, SEQ ID NO:15, SEQ ID NO:16, SEQ ID NO:17, SEQ ID NO:18, SEQ ID NO:19, SEQ ID NO:20, SEQ ID NO:21, SEQ ID NO:22, SEQ ID NO:23, SEQ ID NO:24, SEQ ID NO:48, SEQ ID NO:52, SEQ ID NO:59, SEQ ID NO:66, SEQ ID NO:73, SEQ ID NO:80, SEQ ID NO:84, SEQ ID NO:91, SEQ ID NO:98, SEQ ID NO:105, SEQ ID NO:109, SEQ ID NO:113, SEQ ID NO:120, SEQ ID NO:127, SEQ ID NO:134, SEQ ID NO:49, SEQ ID NO:56, SEQ ID NO:63, SEQ ID NO:70, SEQ ID NO:77, SEQ ID NO:81, SEQ ID NO:88, SEQ ID NO:95, SEQ ID NO:102, SEQ ID NO:106, SEQ ID NO:110, SEQ ID NO:117, SEQ ID NO:124, SEQ ID NO:131, SEQ ID NO:138, SEQ ID NO:50, SEQ ID NO:57, SEQ ID NO:64, SEQ ID NO:71, SEQ ID NO:78, SEQ ID NO:82, SEQ ID NO:89, SEQ ID NO:96, SEQ ID NO:103, SEQ ID NO:107, SEQ ID NO:111, SEQ ID NO: 118, SEQ ID NO:125, SEQ ID NO:132, SEQ ID NO:139, SEQ ID NO:51, SEQ ID NO:58, SEQ ID NO:65, SEQ ID NO:72, SEQ ID NO:79, SEQ ID NO:83, SEQ ID NO:90, SEQ ID NO:97, SEQ ID NO:104, SEQ ID NO:108, SEQ ID NO:112, SEQ ID NO:119, SEQ ID NO:126, SEQ ID NO:133, or SEQ ID NO:140.

[0371] In certain embodiments, the arenaviral ORF encodes arenavirus GP, namely arenavirus glycoprotein or any glycoprotein precursor. In certain embodiments, the arenaviral ORF encodes a wild-type arenavirus glycoprotein or any wild-type glycoprotein precursor. In other embodiments, the arenaviral ORF encodes a recombinant arenavirus glycoprotein or any recombinant glycoprotein precursor. In certain embodiments, the arenavirus glycoprotein precursor can be processed into a GP signal peptide, a GP1 and a GP2. In certain embodiments, the arenavirus GP is arenavirus glycoprotein or any glycoprotein precursor of LCMV, Lassa virus, Pichinde virus, Oliveros virus, Tamiami virus, Mobala virus, Mopeia virus, Ippy virus, Amapari virus, Flexal virus, Guanarito virus, Latino virus, Machupo virus, Parana virus, Pirital virus, Sabia virus, Tacaribe virus, Bear Canyon virus, Whitewater Arroyo virus, Allpahuayo virus (ALLV), Alxa virus, Chapare virus, Lijiang virus, Cupixi virus, Gairo virus, Loei River virus, Lujo virus, Luna virus, Luli virus, Lunk virus, Mariental virus, Merino Walk virus, Morogoro virus, Okahandja virus, Aporé virus, Ryukyu virus, Solwezi virus, souris virus, Wenzhou virus, Big Brushy Tank virus, Catarina virus, Skinner Tank virus, Tonto Creek virus, Xapuri virus, or Junin virus. In certain embodiments, the arenavirus GP as described herein comprises an amino acid sequence that is at least 80%, 85%, 90%, 95%, 96%, 97%, 98%, 99% or 100% identical to the amino acid sequence of SEQ ID NO:1, SEQ ID NO:2, SEQ ID NO:3, SEQ ID NO:4, SEQ ID NO:5, SEQ ID NO:6, SEQ ID NO:48, SEQ ID NO:52, SEQ ID NO:59, SEQ ID NO:66, SEQ ID NO:73, SEQ ID NO:80, SEQ ID NO:84, SEQ ID NO:91, SEQ ID NO:98, SEQ ID NO:105, SEQ ID NO:109, SEQ ID NO: 113, SEQ ID NO:120, SEQ ID NO:127, or SEQ ID NO:134. In certain embodiments, the arenavirus GP as described herein comprises an amino acid sequence that is at least 80% identical to the amino acid sequence of SEQ ID NO:1, SEQ ID NO:2, SEQ ID NO:3, SEQ ID NO:4, SEQ ID NO:5, SEQ ID NO:6, SEQ ID NO:48, SEQ ID NO:52, SEQ ID NO:59, SEQ ID NO:66, SEQ ID NO:73, SEQ ID NO:80, SEQ ID NO:84, SEQ ID NO:91, SEQ ID NO:98, SEQ ID NO:105, SEQ ID NO:109, SEQ ID NO:113, SEQ ID NO:120, SEQ ID NO:127, or SEQ ID NO:134. In certain embodiments, the arenavirus GP as described herein comprises an amino acid sequence that is at least 85% identical to the amino acid sequence of SEQ ID NO:1, SEQ ID NO:2, SEQ ID NO:3, SEQ ID NO:4, SEQ ID NO:5, SEQ ID NO:6, SEQ ID NO:48, SEQ ID NO:52, SEQ ID NO:59, SEQ ID NO:66, SEQ ID NO:73, SEQ ID NO:80, SEQ ID NO:84, SEQ ID NO:91, SEQ ID NO:98, SEQ ID NO:105, SEQ ID NO:109, SEQ ID NO: 113, SEQ ID NO:120, SEQ ID NO:127, or SEQ ID NO:134. In certain embodiments, the GP as described herein comprises an amino acid sequence that is at least 90% identical to the amino acid sequence of SEQ ID NO:1, SEQ ID NO:2, SEQ ID NO:3, SEQ ID NO:4, SEQ ID NO:5, SEQ ID NO:6, SEQ ID NO:48, SEQ ID NO:52, SEQ ID NO:59, SEQ ID NO:66, SEQ ID NO:73, SEQ ID NO:80, SEQ ID NO:84, SEQ ID NO:91, SEQ ID NO:98, SEQ ID NO:105, SEQ ID NO:109, SEQ ID NO:113, SEQ ID NO:120, SEQ ID NO:127, or SEQ ID NO:134. In certain embodiments, the arenavirus GP as described herein comprises an amino acid sequence that is at least 95% identical to the amino acid sequence of SEQ ID NO:1, SEQ ID NO:2, SEQ ID NO:3, SEQ ID NO:4, SEQ ID NO:5, SEQ ID NO:6, SEQ ID NO:48, SEQ ID NO:52, SEQ ID NO:59, SEQ ID NO:66, SEQ ID NO:73, SEQ ID NO:80, SEQ ID NO:84, SEQ ID NO:91, SEQ ID NO:98, SEQ ID NO:105, SEQ ID NO:109, SEQ ID NO: 113, SEQ ID NO:120, SEQ ID NO:127, or SEQ ID NO:134. In certain embodiments, the arenavirus GP as described herein comprises an amino acid sequence that is at least 96% identical to the amino acid sequence of SEQ ID NO:1, SEQ ID NO:2, SEQ ID NO:3, SEQ ID NO:4, SEQ ID NO:5, SEQ ID NO:6, SEQ ID NO:48, SEQ ID NO:52, SEQ ID NO:59, SEQ ID NO:66, SEQ ID NO:73, SEQ ID NO:80, SEQ ID NO:84, SEQ ID NO:91, SEQ ID NO:98, SEQ ID NO:105, SEQ ID NO:109, SEQ ID NO:113, SEQ ID NO:120, SEQ ID NO:127, or SEQ ID NO:134. In certain embodiments, the arenavirus GP as described herein comprises an amino acid sequence that is at least 97% identical to the amino acid sequence of SEQ ID NO:1, SEQ ID NO:2, SEQ ID NO:3, SEQ ID NO:4, SEQ ID NO:5, SEQ ID NO:6, SEQ ID NO:48, SEQ ID NO:52, SEQ ID NO:59, SEQ ID NO:66, SEQ ID NO:73, SEQ ID NO:80, SEQ ID NO:84, SEQ ID NO:91, SEQ ID NO:98, SEQ ID NO:105, SEQ ID NO:109, SEQ ID NO: 113, SEQ ID NO:120, SEQ ID NO:127, or SEQ ID NO:134. In certain embodiments, the arenavirus GP as described herein comprises an amino acid sequence that is at least 98% identical to the amino acid sequence of SEQ ID NO:1, SEQ ID NO:2, SEQ ID NO:3, SEQ ID NO:4, SEQ ID NO:5, SEQ ID NO:6, SEQ ID NO:48, SEQ ID NO:52, SEQ ID NO:59, SEQ ID NO:66, SEQ ID NO:73, SEQ ID NO:80, SEQ ID NO:84, SEQ ID NO:91, SEQ ID NO:98, SEQ ID NO:105, SEQ ID NO:109, SEQ ID NO:113, SEQ ID NO:120, SEQ ID NO:127, or SEQ ID NO:134. In certain embodiments, the arenavirus GP as described herein comprises an amino acid sequence that is at least 99% identical to the amino acid sequence of SEQ ID NO:1, SEQ ID NO:2, SEQ ID NO:3, SEQ ID NO:4, SEQ ID NO:5, SEQ ID NO:6, SEQ ID NO:48, SEQ ID NO:52, SEQ ID NO:59, SEQ ID NO:66, SEQ ID NO:73, SEQ ID NO:80, SEQ ID NO:84, SEQ ID NO:91, SEQ ID NO:98, SEQ ID NO:105, SEQ ID NO:109, SEQ ID NO: 113, SEQ ID NO:120, SEQ ID NO:127, or SEQ ID NO:134. In certain embodiments, the arenavirus GP as described herein comprises an amino acid sequence that is 100% identical to the amino acid sequence of SEQ ID NO:1, SEQ ID NO:2, SEQ ID NO:3, SEQ ID NO:4, SEQ ID NO:5, SEQ ID NO:6, SEQ ID NO:48, SEQ ID NO:52, SEQ ID NO:59, SEQ ID NO:66, SEQ ID NO:73, SEQ ID NO:80, SEQ ID NO:84, SEQ ID NO:91, SEQ ID NO:98, SEQ ID NO:105, SEQ ID NO:109, SEQ ID NO:113, SEQ ID NO:120, SEQ ID NO:127, or SEQ ID NO:134. In certain embodiments, the GP as described herein comprises an amino acid sequence that is 80% identical to the amino acid sequence of SEQ ID NO:1, SEQ ID NO:2, SEQ ID NO:3, SEQ ID NO:4, SEQ ID NO:5, SEQ ID NO:6, SEQ ID NO:48, SEQ ID NO:52, SEQ ID NO:59, SEQ ID NO:66, SEQ ID NO:73, SEQ ID NO:80, SEQ ID NO:84, SEQ ID NO:91, SEQ ID NO:98, SEQ ID NO:105, SEQ ID NO:109, SEQ ID NO: 113, SEQ ID NO:120, SEQ ID NO:127, or SEQ ID NO:134. In certain embodiments, the arenavirus GP as described herein comprises an amino acid sequence that is 85% identical to the amino acid sequence of SEQ ID NO:1, SEQ ID NO:2, SEQ ID NO:3, SEQ ID NO:4, SEQ ID NO:5, SEQ ID NO:6, SEQ ID NO:48, SEQ ID NO:52, SEQ ID NO:59, SEQ ID NO:66, SEQ ID NO:73, SEQ ID NO:80, SEQ ID NO:84, SEQ ID NO:91, SEQ ID NO:98, SEQ ID NO:105, SEQ ID NO:109, SEQ ID NO:113, SEQ ID NO:120, SEQ ID NO:127, or SEQ ID NO:134. In certain embodiments, the arenavirus GP as described herein comprises an amino acid sequence that is 90% identical to the amino acid sequence of SEQ ID NO:1, SEQ ID NO:2, SEQ ID NO:3, SEQ ID NO:4, SEQ ID NO:5, SEQ ID NO:6, SEQ ID NO:48, SEQ ID NO:52, SEQ ID NO:59, SEQ ID NO:66, SEQ ID NO:73, SEQ ID NO:80, SEQ ID NO:84, SEQ ID NO:91, SEQ ID NO:98, SEQ ID NO:105, SEQ ID NO:109, SEQ ID NO: 113, SEQ ID NO:120, SEQ ID NO:127, or SEQ ID NO:134. In certain embodiments, the arenavirus GP as described herein comprises an amino acid sequence that is 95% identical to the amino acid sequence of SEQ ID NO:1, SEQ ID NO:2, SEQ ID NO:3, SEQ ID NO:4, SEQ ID NO:5, SEQ ID NO:6, SEQ ID NO:48, SEQ ID NO:52, SEQ ID NO:59, SEQ ID NO:66, SEQ ID NO:73, SEQ ID NO:80, SEQ ID NO:84, SEQ ID NO:91, SEQ ID NO:98, SEQ ID NO:105, SEQ ID NO:109, SEQ ID NO:113, SEQ ID NO:120, SEQ ID NO:127, or SEQ ID NO:134. In certain embodiments, the arenavirus GP as described herein comprises an amino acid sequence that is 96% identical to the amino acid sequence of SEQ ID NO:1, SEQ ID NO:2, SEQ ID NO:3, SEQ ID NO:4, SEQ ID NO:5, SEQ ID NO:6, SEQ ID NO:48, SEQ ID NO:52, SEQ ID NO:59, SEQ ID NO:66, SEQ ID NO:73, SEQ ID NO:80, SEQ ID NO:84, SEQ ID NO:91, SEQ ID NO:98, SEQ ID NO:105, SEQ ID NO:109, SEQ ID NO: 113, SEQ ID NO:120, SEQ ID NO:127, or SEQ ID NO:134. In certain embodiments, the arenavirus GP as described herein comprises an amino acid sequence that is 97% identical to the amino acid sequence of SEQ ID NO:1, SEQ ID NO:2, SEQ ID NO:3, SEQ ID NO:4, SEQ ID NO:5, SEQ ID NO:6, SEQ ID NO:48, SEQ ID NO:52, SEQ ID NO:59, SEQ ID NO:66, SEQ ID NO:73, SEQ ID NO:80, SEQ ID NO:84, SEQ ID NO:91, SEQ ID NO:98, SEQ ID NO:105, SEQ ID NO:109, SEQ ID NO:113, SEQ ID NO:120, SEQ ID NO:127, or SEQ ID NO:134. In certain embodiments, the arenavirus GP as described herein comprises an amino acid sequence that is 98% identical to the amino acid sequence of SEQ ID NO:1, SEQ ID NO:2, SEQ ID NO:3, SEQ ID NO:4, SEQ ID NO:5, SEQ ID NO:6, SEQ ID NO:48, SEQ ID NO:52, SEQ ID NO:59, SEQ ID NO:66, SEQ ID NO:73, SEQ ID NO:80, SEQ ID NO:84, SEQ ID NO:91, SEQ ID NO:98, SEQ ID NO:105, SEQ ID NO:109, SEQ ID NO: 113, SEQ ID NO:120, SEQ ID NO:127, or SEQ ID NO:134. In certain embodiments, the arenavirus GP as described herein comprises an amino acid sequence that is 99% identical to the amino acid sequence of SEQ ID NO:1, SEQ ID NO:2, SEQ ID NO:3, SEQ ID NO:4, SEQ ID NO:5, SEQ ID NO:6, SEQ ID NO:48, SEQ ID NO:52, SEQ ID NO:59, SEQ ID NO:66, SEQ ID NO:73, SEQ ID NO:80, SEQ ID NO:84, SEQ ID NO:91, SEQ ID NO:98, SEQ ID NO:105, SEQ ID NO:109, SEQ ID NO:113, SEQ ID NO:120, SEQ ID NO:127, or SEQ ID NO:134.

[0372] In certain embodiments, the arenaviral ORF encodes arenavirus NP, namely arenavirus nucleoprotein or any nucleoprotein precursor. In certain embodiments, the arenaviral ORF encodes a wild-type arenavirus nucleoprotein or any wild-type nucleoprotein precursor. In other embodiments, the arenaviral ORF encodes a recombinant arenavirus nucleoprotein or any recombinant nucleoprotein precursor. In certain embodiments, the arenavirus NP is arenavirus nucleoprotein or any nucleoprotein precursor of LCMV, Lassa virus, Pichinde virus, Oliveros virus, Tamiami virus, Mobala virus, Mopeia virus, Ippy virus, Amapari virus, Flexal virus, Guanarito virus, Latino virus, Machupo virus, Parana virus, Pirital virus, Sabia virus, Tacaribe virus, Bear Canyon virus, Whitewater Arroyo virus, Allpahuayo virus (ALLV), Alxa virus, Chapare virus, Lijiang virus, Cupixi virus, Gairo virus, Loei River virus, Lujo virus, Luna virus, Luli virus, Lunk virus, Mariental virus, Merino Walk virus, Morogoro virus, Okahandja virus, Aporé virus, Ryukyu virus, Solwezi virus, souris virus, Wenzhou virus, Big Brushy Tank virus, Catarina virus, Skinner Tank virus, Tonto Creek virus, Xapuri virus, or Junin virus. In certain embodiments, the arenavirus NP as described herein comprises an amino acid sequence that is at least 80%, 85%, 90%, 95%, 96%, 97%, 98%, 99% or 100% identical to the amino acid sequence of SEQ ID NO:7, SEQ ID NO:8, SEQ ID NO:9, SEQ ID NO:10, SEQ ID NO: 11, SEQ ID NO:12, SEQ ID NO:49, SEQ ID NO:56, SEQ ID NO:63, SEQ ID NO:70, SEQ ID NO:77, SEQ ID NO:81, SEQ ID NO:88, SEQ ID NO:95, SEQ ID NO:102, SEQ ID NO:106, SEQ ID NO:110, SEQ ID NO: 117, SEQ ID NO:124, SEQ ID NO:131, or SEQ ID NO:138. In certain embodiments, the arenavirus NP as described herein comprises an amino acid sequence that is at least 80% identical to the amino acid sequence of SEQ ID NO:7, SEQ ID NO:8, SEQ ID NO:9, SEQ ID NO:10, SEQ ID NO:11, SEQ ID NO:12, SEQ ID NO:49, SEQ ID NO:56, SEQ ID NO:63, SEQ ID NO:70, SEQ ID NO:77, SEQ ID NO:81, SEQ ID NO:88, SEQ ID NO:95, SEQ ID NO:102, SEQ ID NO:106, SEQ ID NO:110, SEQ ID NO: 117, SEQ ID NO:124, SEQ ID NO:131, or SEQ ID NO:138. In certain embodiments, the arenavirus NP as described herein comprises an amino acid sequence that is at least 85% identical to the amino acid sequence of SEQ ID NO:7, SEQ ID NO:8, SEQ ID NO:9, SEQ ID NO:10, SEQ ID NO:11, SEQ ID NO:12, SEQ ID NO:49, SEQ ID NO:56, SEQ ID NO:63, SEQ ID NO:70, SEQ ID NO:77, SEQ ID NO:81, SEQ ID NO:88, SEQ ID NO:95, SEQ ID NO:102, SEQ ID NO:106, SEQ ID NO:110, SEQ ID NO:117, SEQ ID NO:124, SEQ ID NO:131, or SEQ ID NO:138. In certain embodiments, the arenavirus NP as described herein comprises an amino acid sequence that is at least 90% identical to the amino acid sequence of SEQ ID NO:7, SEQ ID NO:8, SEQ ID NO:9, SEQ ID NO:10, SEQ ID NO:11, SEQ ID NO:12, SEQ ID NO:49, SEQ ID NO:56, SEQ ID NO:63, SEQ ID NO:70, SEQ ID NO:77, SEQ ID NO:81, SEQ ID NO:88, SEQ ID NO:95, SEQ ID NO:102, SEQ ID NO:106, SEQ ID NO:110, SEQ ID NO:117, SEQ ID NO:124, SEQ ID NO:131, or SEQ ID NO:138. In certain embodiments, the arenavirus NP as described herein comprises an amino acid sequence that is at least 95% identical to the amino acid sequence of SEQ ID NO:7, SEQ ID NO:8, SEQ ID NO:9, SEQ ID NO:10, SEQ ID NO:11, SEQ ID NO:12, SEQ ID NO:49, SEQ ID NO:56, SEQ ID NO:63, SEQ ID NO:70, SEQ ID NO:77, SEQ ID NO:81, SEQ ID NO:88, SEQ ID NO:95, SEQ ID NO:102, SEQ ID NO:106, SEQ ID NO:110, SEQ ID NO: 117, SEQ ID NO:124, SEQ ID NO:131, or SEQ ID NO:138. In certain embodiments, the arenavirus NP as described herein comprises an amino acid sequence that is at least 96% identical to the amino acid sequence of SEQ ID NO:7, SEQ ID NO:8, SEQ ID NO:9, SEQ ID NO:10, SEQ ID NO:11, SEQ ID NO:12, SEQ ID NO:49, SEQ ID NO:56, SEQ ID NO:63, SEQ ID NO:70, SEQ ID NO:77, SEQ ID NO:81, SEQ ID NO:88, SEQ ID NO:95, SEQ ID NO:102, SEQ ID NO:106, SEQ ID NO:110, SEQ ID NO: 117, SEQ ID NO:124, SEQ ID NO:131, or SEQ ID NO:138. In certain embodiments, the arenavirus NP as described herein comprises an amino acid sequence that is at least 97% identical to the amino acid sequence of SEQ ID NO:7, SEQ ID NO:8, SEQ ID NO:9, SEQ ID NO:10, SEQ ID NO:11, SEQ ID NO:12, SEQ ID NO:49, SEQ ID NO:56, SEQ ID NO:63, SEQ ID NO:70, SEQ ID NO:77, SEQ ID NO:81, SEQ ID NO:88, SEQ ID NO:95, SEQ ID NO:102, SEQ ID NO:106, SEQ ID NO:110, SEQ ID NO: 117, SEQ ID NO:124, SEQ ID NO:131, or SEQ ID NO:138. In certain embodiments, the arenavirus NP as described herein comprises an amino acid sequence that is at least 98% identical to the amino acid sequence of SEQ ID NO:7, SEQ ID NO:8, SEQ ID NO:9, SEQ ID NO:10, SEQ ID NO:11, SEQ ID NO:12, SEQ ID NO:49, SEQ ID NO:56, SEQ ID NO:63, SEQ ID NO:70, SEQ ID NO:77, SEQ ID NO:81, SEQ ID NO:88, SEQ ID NO:95, SEQ ID NO:102, SEQ ID NO:106, SEQ ID NO:110, SEQ ID NO:117, SEQ ID NO:124, SEQ ID NO:131, or SEQ ID NO:138. In certain embodiments, the arenavirus NP as described herein comprises an amino acid sequence that is at least 99% identical to the amino acid sequence of SEQ ID NO:7, SEQ ID NO:8, SEQ ID NO:9, SEQ ID NO:10, SEQ ID NO:11, SEQ ID NO:12, SEQ ID NO:49, SEQ ID NO:56, SEQ ID NO:63, SEQ ID NO:70, SEQ ID NO:77, SEQ ID NO:81, SEQ ID NO:88, SEQ ID NO:95, SEQ ID NO:102, SEQ ID NO:106, SEQ ID NO:110, SEQ ID NO:117, SEQ ID NO:124, SEQ ID NO:131, or SEQ ID NO:138. In certain embodiments, the arenavirus NP as described herein comprises an amino acid sequence that is 100% identical to the amino acid sequence of SEQ ID NO:7, SEQ ID NO:8, SEQ ID NO:9, SEQ ID NO:10, SEQ ID NO:11, SEQ ID NO:12, SEQ ID NO:49, SEQ ID NO:56, SEQ ID NO:63, SEQ ID NO:70, SEQ ID NO:77, SEQ ID NO:81, SEQ ID NO:88, SEQ ID NO:95, SEQ ID NO:102, SEQ ID NO:106, SEQ ID NO:110, SEQ ID NO: 117, SEQ ID NO:124, SEQ ID NO:131, or SEQ ID NO:138. In certain embodiments, the arenavirus NP as described herein comprises an amino acid sequence that is 80% identical to the amino acid sequence of SEQ ID NO:7, SEQ ID NO:8, SEQ ID NO:9, SEQ ID NO:10, SEQ ID NO: 11, SEQ ID NO:12, SEQ ID NO:49, SEQ ID NO:56, SEQ ID NO:63, SEQ ID NO:70, SEQ ID NO:77, SEQ ID NO:81, SEQ ID NO:88, SEQ ID NO:95, SEQ ID NO:102, SEQ ID NO:106, SEQ ID NO:110, SEQ ID NO: 117, SEQ ID NO:124, SEQ ID NO:131, or SEQ ID NO:138. In certain embodiments, the arenavirus NP as described herein comprises an amino acid sequence that is 85% identical to the amino acid sequence of SEQ ID NO:7, SEQ ID NO:8, SEQ ID NO:9, SEQ ID NO:10, SEQ ID NO: 11, SEQ ID NO:12, SEQ ID NO:49, SEQ ID NO:56, SEQ ID NO:63, SEQ ID NO:70, SEQ ID NO:77, SEQ ID NO:81, SEQ ID NO:88, SEQ ID NO:95, SEQ ID NO:102, SEQ ID NO:106, SEQ ID NO:110, SEQ ID NO: 117, SEQ ID NO:124, SEQ ID NO:131, or SEQ ID NO:138. In certain embodiments, the arenavirus NP as described herein comprises an amino acid sequence that is 90% identical to the amino acid sequence of SEQ ID NO:7, SEQ ID NO:8, SEQ ID NO:9, SEQ ID NO:10, SEQ ID NO:11, SEQ ID NO:12, SEQ ID NO:49, SEQ ID NO:56, SEQ ID NO:63, SEQ ID NO:70, SEQ ID NO:77, SEQ ID NO:81, SEQ ID NO:88, SEQ ID NO:95, SEQ ID NO:102, SEQ ID NO:106, SEQ ID NO:110, SEQ ID NO: 117, SEQ ID NO:124, SEQ ID NO:131, or SEQ ID NO:138. In certain embodiments, the arenavirus NP as described herein comprises an amino acid sequence that is 95% identical to the amino acid sequence of SEQ ID NO:7, SEQ ID NO:8, SEQ ID NO:9, SEQ ID NO:10, SEQ ID NO: 11, SEQ ID NO:12, SEQ ID NO:49, SEQ ID NO:56, SEQ ID NO:63, SEQ ID NO:70, SEQ ID NO:77, SEQ ID NO:81, SEQ ID NO:88, SEQ ID NO:95, SEQ ID NO:102, SEQ ID NO:106, SEQ ID NO:110, SEQ ID NO: 117, SEQ ID NO:124, SEQ ID NO:131, or SEQ ID NO:138. In certain embodiments, the arenavirus NP as described herein comprises an amino acid sequence that is 96% identical to the amino acid sequence of SEQ ID NO:7, SEQ ID NO:8, SEQ ID NO:9, SEQ ID NO:10, SEQ ID NO:11, SEQ ID NO:12, SEQ ID NO:49, SEQ ID NO:56, SEQ ID NO:63, SEQ ID NO:70, SEQ ID NO:77, SEQ ID NO:81, SEQ ID NO:88, SEQ ID NO:95, SEQ ID NO:102, SEQ ID NO:106, SEQ ID NO:110, SEQ ID NO:117, SEQ ID NO:124, SEQ ID NO:131, or SEQ ID NO:138. In certain embodiments, the arenavirus NP as described herein comprises an amino acid sequence that is 97% identical to the amino acid sequence of SEQ ID NO:7, SEQ ID NO:8, SEQ ID NO:9, SEQ ID NO:10, SEQ ID NO:11, SEQ ID NO:12, SEQ ID NO:49, SEQ ID NO:56, SEQ ID NO:63, SEQ ID NO:70, SEQ ID NO:77, SEQ ID NO:81, SEQ ID NO:88, SEQ ID NO:95, SEQ ID NO:102, SEQ ID NO:106, SEQ ID NO:110, SEQ ID NO: 117, SEQ ID NO:124, SEQ ID NO:131, or SEQ ID NO:138. In certain embodiments, the arenavirus NP as described herein comprises an amino acid sequence that is 98% identical to the amino acid sequence of SEQ ID NO:7, SEQ ID NO:8, SEQ ID NO:9, SEQ ID NO:10, SEQ ID NO:11, SEQ ID NO:12, SEQ ID NO:49, SEQ ID NO:56, SEQ ID NO:63, SEQ ID NO:70, SEQ ID NO:77, SEQ ID NO:81, SEQ ID NO:88, SEQ ID NO:95, SEQ ID NO:102, SEQ ID NO:106, SEQ ID NO:110, SEQ ID NO:117, SEQ ID NO:124, SEQ ID NO:131, or SEQ ID NO:138. In certain embodiments, the arenavirus NP as described herein comprises an amino acid sequence that is 99% identical to the amino acid sequence of SEQ ID NO:7, SEQ ID NO:8, SEQ ID NO:9, SEQ ID NO:10, SEQ ID NO:11, SEQ ID NO:12, SEQ ID NO:49, SEQ ID NO:56, SEQ ID NO:63, SEQ ID NO:70, SEQ ID NO:77, SEQ ID NO:81, SEQ ID NO:88, SEQ ID NO:95, SEQ ID NO:102, SEQ ID NO:106, SEQ ID NO:110, SEQ ID NO: 117, SEQ ID NO:124, SEQ ID NO:131, or SEQ ID NO:138.

[0373] In certain embodiments, the arenaviral ORF encodes arenavirus Z, namely arenavirus Z protein or any Z protein precursor. In certain embodiments, the polypeptide described herein is a wild-type arenavirus Z protein or any wild-type Z protein precursor. In certain embodiments, the arenaviral ORF encodes a recombinant arenavirus Z protein or any recombinant Z protein precursor. In certain embodiments, the arenavirus Z is arenavirus Z protein or any Z protein precursor of LCMV, Lassa virus, Pichinde virus, Oliveros virus, Tamiami virus, Mobala virus, Mopeia virus, Ippy virus, Amapari virus, Flexal virus, Guanarito virus, Latino virus, Machupo virus, Parana virus, Pirital virus, Sabia virus, Tacaribe virus, Bear Canyon virus, Whitewater Arroyo virus, Allpahuayo virus (ALLV), Alxa virus, Chapare virus, Lijiang virus, Cupixi virus, Gairo virus, Loei River virus, Lujo virus, Luna virus, Luli virus, Lunk virus, Mariental virus, Merino Walk virus, Morogoro virus, Okahandja virus, Aporé virus, Ryukyu virus, Solwezi virus, souris virus, Wenzhou virus, Big Brushy Tank virus, Catarina virus, Skinner Tank virus, Tonto Creek virus, Xapuri virus, or Junin virus. In certain embodiments, the arenavirus Z as described herein comprises an amino acid sequence that is at least 80%, 85%, 90%, 95%, 96%, 97%, 98%, 99% or 100% identical to the amino acid sequence of SEQ ID NO:13, SEQ ID NO:14, SEQ ID NO:15, SEQ ID NO:16, SEQ ID NO:17, SEQ ID NO:18, SEQ ID NO:50, SEQ ID NO:57, SEQ ID NO:64, SEQ ID NO:71, SEQ ID NO:78, SEQ ID NO:82, SEQ ID NO:89, SEQ ID NO:96, SEQ ID NO:103, SEQ ID NO:107, SEQ ID NO:111, SEQ ID NO: 118, SEQ ID NO:125, SEQ ID NO:132, or SEQ ID NO:139. In certain embodiments, the arenavirus Z as described herein comprises an amino acid sequence that is at least 80% identical to the amino acid sequence of SEQ ID NO:13, SEQ ID NO:14, SEQ ID NO:15, SEQ ID NO:16, SEQ ID NO:17, SEQ ID NO:18, SEQ ID NO:50, SEQ ID NO:57, SEQ ID NO:64, SEQ ID NO:71, SEQ ID NO:78, SEQ ID NO:82, SEQ ID NO:89, SEQ ID NO:96, SEQ ID NO:103, SEQ ID NO:107, SEQ ID NO:111, SEQ ID NO: 118, SEQ ID NO:125, SEQ ID NO:132, or SEQ ID NO:139. In certain embodiments, the arenavirus Z as described herein comprises an amino acid sequence that is at least 85% identical to the amino acid sequence of SEQ ID NO:13, SEQ ID NO:14, SEQ ID NO:15, SEQ ID NO:16, SEQ ID NO:17, SEQ ID NO:18, SEQ ID NO:50, SEQ ID NO:57, SEQ ID NO:64, SEQ ID NO:71, SEQ ID NO:78, SEQ ID NO:82, SEQ ID NO:89, SEQ ID NO:96, SEQ ID NO:103, SEQ ID NO:107, SEQ ID NO:111, SEQ ID NO: 118, SEQ ID NO:125, SEQ ID NO:132, or SEQ ID NO:139. In certain embodiments, the arenavirus Z as described herein comprises an amino acid sequence that is at least 90% identical to the amino acid sequence of SEQ ID NO:13, SEQ ID NO:14, SEQ ID NO:15, SEQ ID NO:16, SEQ ID NO:17, SEQ ID NO:18, SEQ ID NO:50, SEQ ID NO:57, SEQ ID NO:64, SEQ ID NO:71, SEQ ID NO:78, SEQ ID NO:82, SEQ ID NO:89, SEQ ID NO:96, SEQ ID NO:103, SEQ ID NO:107, SEQ ID NO:111, SEQ ID NO: 118, SEQ ID NO:125, SEQ ID NO:132, or SEQ ID NO:139. In certain embodiments, the arenavirus Z as described herein comprises an amino acid sequence that is at least 95% identical to the amino acid sequence of SEQ ID NO:13, SEQ ID NO:14, SEQ ID NO:15, SEQ ID NO:16, SEQ ID NO:17, SEQ ID NO:18, SEQ ID NO:50, SEQ ID NO:57, SEQ ID NO:64, SEQ ID NO:71, SEQ ID NO:78, SEQ ID NO:82, SEQ ID NO:89, SEQ ID NO:96, SEQ ID NO:103, SEQ ID NO:107, SEQ ID NO:111, SEQ ID NO: 118, SEQ ID NO:125, SEQ ID NO:132, or SEQ ID NO:139. In certain embodiments, the arenavirus Z as described herein comprises an amino acid sequence that is at least 96% identical to the amino acid sequence of SEQ ID NO:13, SEQ ID NO:14, SEQ ID NO:15, SEQ ID NO:16, SEQ ID NO:17, SEQ ID NO:18, SEQ ID NO:50, SEQ ID NO:57, SEQ ID NO:64, SEQ ID NO:71, SEQ ID NO:78, SEQ ID NO:82, SEQ ID NO:89, SEQ ID NO:96, SEQ ID NO:103, SEQ ID NO:107, SEQ ID NO:111, SEQ ID NO: 118, SEQ ID NO:125, SEQ ID NO:132, or SEQ ID NO:139. In certain embodiments, the arenavirus Z as described herein comprises an amino acid sequence that is at least 97% identical to the amino acid sequence of SEQ ID NO:13, SEQ ID NO:14, SEQ ID NO:15, SEQ ID NO:16, SEQ ID NO:17, SEQ ID NO:18, SEQ ID NO:50, SEQ ID NO:57, SEQ ID NO:64, SEQ ID NO:71, SEQ ID NO:78, SEQ ID NO:82, SEQ ID NO:89, SEQ ID NO:96, SEQ ID NO:103, SEQ ID NO:107, SEQ ID NO:111, SEQ ID NO: 118, SEQ ID NO:125, SEQ ID NO:132, or SEQ ID NO:139. In certain embodiments, the arenavirus Z as described herein comprises an amino acid sequence that is at least 98% identical to the amino acid sequence of SEQ ID NO:13, SEQ ID NO:14, SEQ ID NO:15, SEQ ID NO:16, SEQ ID NO:17, SEQ ID NO:18, SEQ ID NO:50, SEQ ID NO:57, SEQ ID NO:64, SEQ ID NO:71, SEQ ID NO:78, SEQ ID NO:82, SEQ ID NO:89, SEQ ID NO:96, SEQ ID NO:103, SEQ ID NO:107, SEQ ID NO:111, SEQ ID NO: 118, SEQ ID NO:125, SEQ ID NO:132, or SEQ ID NO:139. In certain embodiments, the arenavirus Z as described herein comprises an amino acid sequence that is at least 99% identical to the amino acid sequence of SEQ ID NO:13, SEQ ID NO:14, SEQ ID NO:15, SEQ ID NO:16, SEQ ID NO:17, SEQ ID NO:18, SEQ ID NO:50, SEQ ID NO:57, SEQ ID NO:64, SEQ ID NO:71, SEQ ID NO:78, SEQ ID NO:82, SEQ ID NO:89, SEQ ID NO:96, SEQ ID NO:103, SEQ ID NO:107, SEQ ID NO:111, SEQ ID NO: 118, SEQ ID NO:125, SEQ ID NO:132, or SEQ ID NO:139. In certain embodiments, the arenavirus Z as described herein comprises an amino acid sequence that is 100% identical to the amino acid sequence of SEQ ID NO:13, SEQ ID NO:14, SEQ ID NO:15, SEQ ID NO:16, SEQ ID NO:17, SEQ ID NO:18, SEQ ID NO:50, SEQ ID NO:57, SEQ ID NO:64, SEQ ID NO:71, SEQ ID NO:78, SEQ ID NO:82, SEQ ID NO:89, SEQ ID NO:96, SEQ ID NO:103, SEQ ID NO:107, SEQ ID NO:111, SEQ ID NO: 118, SEQ ID NO:125, SEQ ID NO:132, or SEQ ID NO:139. In certain embodiments, the arenavirus Z as described herein comprises an amino acid sequence that is 80% identical to the amino acid sequence of SEQ ID NO:13, SEQ ID NO:14, SEQ ID NO:15, SEQ ID NO:16, SEQ ID NO:17, SEQ ID NO:18, SEQ ID NO:50, SEQ ID NO:57, SEQ ID NO:64, SEQ ID NO:71, SEQ ID NO:78, SEQ ID NO:82, SEQ ID NO:89, SEQ ID NO:96, SEQ ID NO:103, SEQ ID NO:107, SEQ ID NO:111, SEQ ID NO: 118, SEQ ID NO:125, SEQ ID NO:132, or SEQ ID NO:139. In certain embodiments, the arenavirus Z as described herein comprises an amino acid sequence that is 85% identical to the amino acid sequence of SEQ ID NO:13, SEQ ID NO:14, SEQ ID NO:15, SEQ ID NO:16, SEQ ID NO:17, SEQ ID NO:18, SEQ ID NO:50, SEQ ID NO:57, SEQ ID NO:64, SEQ ID NO:71, SEQ ID NO:78, SEQ ID NO:82, SEQ ID NO:89, SEQ ID NO:96, SEQ ID NO:103, SEQ ID NO:107, SEQ ID NO:111, SEQ ID NO: 118, SEQ ID NO:125, SEQ ID NO:132, or SEQ ID NO:139. In certain embodiments, the arenavirus Z as described herein comprises an amino acid sequence that is 90% identical to the amino acid sequence of SEQ ID NO:13, SEQ ID NO:14, SEQ ID NO:15, SEQ ID NO:16, SEQ ID NO:17, SEQ ID NO:18, SEQ ID NO:50, SEQ ID NO:57, SEQ ID NO:64, SEQ ID NO:71, SEQ ID NO:78, SEQ ID NO:82, SEQ ID NO:89, SEQ ID NO:96, SEQ ID NO:103, SEQ ID NO:107, SEQ ID NO:111, SEQ ID NO: 118, SEQ ID NO:125, SEQ ID NO:132, or SEQ ID NO:139. In certain embodiments, the arenavirus Z as described herein comprises an amino acid sequence that is 95% identical to the amino acid sequence of SEQ ID NO:13, SEQ ID NO:14, SEQ ID NO:15, SEQ ID NO:16, SEQ ID NO:17, SEQ ID NO:18, SEQ ID NO:50, SEQ ID NO:57, SEQ ID NO:64, SEQ ID NO:71, SEQ ID NO:78, SEQ ID NO:82, SEQ ID NO:89, SEQ ID NO:96, SEQ ID NO:103, SEQ ID NO:107, SEQ ID NO:111, SEQ ID NO: 118, SEQ ID NO:125, SEQ ID NO:132, or SEQ ID NO:139. In certain embodiments, the arenavirus Z as described herein comprises an amino acid sequence that is 96% identical to the amino acid sequence of SEQ ID NO:13, SEQ ID NO:14, SEQ ID NO:15, SEQ ID NO:16, SEQ ID NO:17, SEQ ID NO:18, SEQ ID NO:50, SEQ ID NO:57, SEQ ID NO:64, SEQ ID NO:71, SEQ ID NO:78, SEQ ID NO:82, SEQ ID NO:89, SEQ ID NO:96, SEQ ID NO:103, SEQ ID NO:107, SEQ ID NO:111, SEQ ID NO: 118, SEQ ID NO:125, SEQ ID NO:132, or SEQ ID NO:139. In certain embodiments, the arenavirus Z as described herein comprises an amino acid sequence that is 97% identical to the amino acid sequence of SEQ ID NO:13, SEQ ID NO:14, SEQ ID NO:15, SEQ ID NO:16, SEQ ID NO:17, SEQ ID NO:18, SEQ ID NO:50, SEQ ID NO:57, SEQ ID NO:64, SEQ ID NO:71, SEQ ID NO:78, SEQ ID NO:82, SEQ ID NO:89, SEQ ID NO:96, SEQ ID NO:103, SEQ ID NO:107, SEQ ID NO:111, SEQ ID NO: 118, SEQ ID NO:125, SEQ ID NO:132, or SEQ ID NO:139. In certain embodiments, the arenavirus Z as described herein comprises an amino acid sequence that is 98% identical to the amino acid sequence of SEQ ID NO:13, SEQ ID NO:14, SEQ ID NO:15, SEQ ID NO:16, SEQ ID NO:17, SEQ ID NO:18, SEQ ID NO:50, SEQ ID NO:57, SEQ ID NO:64, SEQ ID NO:71, SEQ ID NO:78, SEQ ID NO:82, SEQ ID NO:89, SEQ ID NO:96, SEQ ID NO:103, SEQ ID NO:107, SEQ ID NO:111, SEQ ID NO: 118, SEQ ID NO:125, SEQ ID NO:132, or SEQ ID NO:139. In certain embodiments, the arenavirus Z as described herein comprises an amino acid sequence that is 99% identical to the amino acid sequence of SEQ ID NO:13, SEQ ID NO:14, SEQ ID NO:15, SEQ ID NO:16, SEQ ID NO:17, SEQ ID NO:18, SEQ ID NO:50, SEQ ID NO:57, SEQ ID NO:64, SEQ ID NO:71, SEQ ID NO:78, SEQ ID NO:82, SEQ ID NO:89, SEQ ID NO:96, SEQ ID NO:103, SEQ ID NO:107, SEQ ID NO:111, SEQ ID NO: 118, SEQ ID NO:125, SEQ ID NO:132, or SEQ ID NO:139.

[0374] In certain embodiments, the arenaviral ORF encodes arenavirus L, namely arenavirus L protein or any L protein precursor. In certain embodiments, the arenaviral ORF encodes a wild-type arenavirus L protein or any wild-type L protein precursor. In certain embodiments, the arenaviral ORF encodes a recombinant arenavirus L protein or any recombinant L protein precursor. In certain embodiments, the arenavirus L is arenavirus L protein or any L protein precursor of LCMV, Lassa virus, Pichinde virus, Oliveros virus, Tamiami virus, Mobala virus, Mopeia virus, Ippy virus, Amapari virus, Flexal virus, Guanarito virus, Latino virus, Machupo virus, Parana virus, Pirital virus, Sabia virus, Tacaribe virus, Bear Canyon virus, Whitewater Arroyo virus, Allpahuayo virus (ALLV), Alxa virus, Chapare virus, Lijiang virus, Cupixi virus, Gairo virus, Loei River virus, Lujo virus, Luna virus, Luli virus, Lunk virus, Mariental virus, Merino Walk virus, Morogoro virus, Okahandja virus, Aporé virus, Ryukyu virus, Solwezi virus, souris virus, Wenzhou virus, Big Brushy Tank virus, Catarina virus, Skinner Tank virus, Tonto Creek virus, Xapuri virus, or Junin virus. In certain embodiments, the arenavirus L as described herein comprises an amino acid sequence that is at least 80%, 85%, 90%, 95%, 96%, 97%, 98%, 99% or 100% identical to the amino acid sequence of SEQ ID NO:19, SEQ ID NO:20, SEQ ID NO:21, SEQ ID NO:22, SEQ ID NO:23, SEQ ID NO:24, SEQ ID NO:51, SEQ ID NO:58, SEQ ID NO:65, SEQ ID NO:72, SEQ ID NO:79, SEQ ID NO:83, SEQ ID NO:90, SEQ ID NO:97, SEQ ID NO:104, SEQ ID NO:108, SEQ ID NO: 112, SEQ ID NO: 119, SEQ ID NO:126, SEQ ID NO:133, or SEQ ID NO:140. In certain embodiments, the arenavirus L as described herein comprises an amino acid sequence that is at least 80% identical to the amino acid sequence of SEQ ID NO:19, SEQ ID NO:20, SEQ ID NO:21, SEQ ID NO:22, SEQ ID NO:23, SEQ ID NO:24, SEQ ID NO:51, SEQ ID NO:58, SEQ ID NO:65, SEQ ID NO:72, SEQ ID NO:79, SEQ ID NO:83, SEQ ID NO:90, SEQ ID NO:97, SEQ ID NO:104, SEQ ID NO:108, SEQ ID NO: 112, SEQ ID NO: 119, SEQ ID NO:126, SEQ ID NO:133, or SEQ ID NO:140. In certain embodiments, the arenavirus L as described herein comprises an amino acid sequence that is at least 85% identical to the amino acid sequence of SEQ ID NO:19, SEQ ID NO:20, SEQ ID NO:21, SEQ ID NO:22, SEQ ID NO:23, SEQ ID NO:24, SEQ ID NO:51, SEQ ID NO:58, SEQ ID NO:65, SEQ ID NO:72, SEQ ID NO:79, SEQ ID NO:83, SEQ ID NO:90, SEQ ID NO:97, SEQ ID NO:104, SEQ ID NO:108, SEQ ID NO:112, SEQ ID NO:119, SEQ ID NO:126, SEQ ID NO:133, or SEQ ID NO:140. In certain embodiments, the arenavirus L as described herein comprises an amino acid sequence that is at least 90% identical to the amino acid sequence of SEQ ID NO:19, SEQ ID NO:20, SEQ ID NO:21, SEQ ID NO:22, SEQ ID NO:23, SEQ ID NO:24, SEQ ID NO:51, SEQ ID NO:58, SEQ ID NO:65, SEQ ID NO:72, SEQ ID NO:79, SEQ ID NO:83, SEQ ID NO:90, SEQ ID NO:97, SEQ ID NO:104, SEQ ID NO:108, SEQ ID NO: 112, SEQ ID NO: 119, SEQ ID NO:126, SEQ ID NO:133, or SEQ ID NO:140. In certain embodiments, the arenavirus L as described herein comprises an amino acid sequence that is at least 95% identical to the amino acid sequence of SEQ ID NO:19, SEQ ID NO:20, SEQ ID NO:21, SEQ ID NO:22, SEQ ID NO:23, SEQ ID NO:24, SEQ ID NO:51, SEQ ID NO:58, SEQ ID NO:65, SEQ ID NO:72, SEQ ID NO:79, SEQ ID NO:83, SEQ ID NO:90, SEQ ID NO:97, SEQ ID NO:104, SEQ ID NO:108, SEQ ID NO: 112, SEQ ID NO: 119, SEQ ID NO:126, SEQ ID NO:133, or SEQ ID NO:140. In certain embodiments, the arenavirus L as described herein comprises an amino acid sequence that is at least 96% identical to the amino acid sequence of SEQ ID NO:19, SEQ ID NO:20, SEQ ID NO:21, SEQ ID NO:22, SEQ ID NO:23, SEQ ID NO:24, SEQ ID NO:51, SEQ ID NO:58, SEQ ID NO:65, SEQ ID NO:72, SEQ ID NO:79, SEQ ID NO:83, SEQ ID NO:90, SEQ ID NO:97, SEQ ID NO:104, SEQ ID NO:108, SEQ ID NO:112, SEQ ID NO:119, SEQ ID NO:126, SEQ ID NO:133, or SEQ ID NO:140. In certain embodiments, the arenavirus L as described herein comprises an amino acid sequence that is at least 97% identical to the amino acid sequence of SEQ ID NO:19, SEQ ID NO:20, SEQ ID NO:21, SEQ ID NO:22, SEQ ID NO:23, SEQ ID NO:24, SEQ ID NO:51, SEQ ID NO:58, SEQ ID NO:65, SEQ ID NO:72, SEQ ID NO:79, SEQ ID NO:83, SEQ ID NO:90, SEQ ID NO:97, SEQ ID NO:104, SEQ ID NO:108, SEQ ID NO: 112, SEQ ID NO: 119, SEQ ID NO:126, SEQ ID NO:133, or SEQ ID NO:140. In certain embodiments, the arenavirus L as described herein comprises an amino acid sequence that is at least 98% identical to the amino acid sequence of SEQ ID NO:19, SEQ ID NO:20, SEQ ID NO:21, SEQ ID NO:22, SEQ ID NO:23, SEQ ID NO:24, SEQ ID NO:51, SEQ ID NO:58, SEQ ID NO:65, SEQ ID NO:72, SEQ ID NO:79, SEQ ID NO:83, SEQ ID NO:90, SEQ ID NO:97, SEQ ID NO:104, SEQ ID NO:108, SEQ ID NO: 112, SEQ ID NO: 119, SEQ ID NO:126, SEQ ID NO:133, or SEQ ID NO:140. In certain embodiments, the arenavirus L as described herein comprises an amino acid sequence that is at least 99% identical to the amino acid sequence of SEQ ID NO:19, SEQ ID NO:20, SEQ ID NO:21, SEQ ID NO:22, SEQ ID NO:23, SEQ ID NO:24, SEQ ID NO:51, SEQ ID NO:58, SEQ ID NO:65, SEQ ID NO:72, SEQ ID NO:79, SEQ ID NO:83, SEQ ID NO:90, SEQ ID NO:97, SEQ ID NO:104, SEQ ID NO:108, SEQ ID NO:112, SEQ ID NO:119, SEQ ID NO:126, SEQ ID NO:133, or SEQ ID NO:140. In certain embodiments, the arenavirus L as described herein comprises an amino acid sequence that is 100% identical to the amino acid sequence of SEQ ID NO:19, SEQ ID NO:20, SEQ ID NO:21, SEQ ID NO:22, SEQ ID NO:23, SEQ ID NO:24, SEQ ID NO:51, SEQ ID NO:58, SEQ ID NO:65, SEQ ID NO:72, SEQ ID NO:79, SEQ ID NO:83, SEQ ID NO:90, SEQ ID NO:97, SEQ ID NO:104, SEQ ID NO:108, SEQ ID NO: 112, SEQ ID NO: 119, SEQ ID NO:126, SEQ ID NO:133, or SEQ ID NO:140. In certain embodiments, the arenavirus L as described herein comprises an amino acid sequence that is 80% identical to the amino acid sequence of SEQ ID NO:19, SEQ ID NO:20, SEQ ID NO:21, SEQ ID NO:22, SEQ ID NO:23, SEQ ID NO:24, SEQ ID NO:51, SEQ ID NO:58, SEQ ID NO:65, SEQ ID NO:72, SEQ ID NO:79, SEQ ID NO:83, SEQ ID NO:90, SEQ ID NO:97, SEQ ID NO:104, SEQ ID NO:108, SEQ ID NO: 112, SEQ ID NO: 119, SEQ ID NO:126, SEQ ID NO:133, or SEQ ID NO:140. In certain embodiments, the arenavirus L as described herein comprises an amino acid sequence that is 85% identical to the amino acid sequence of SEQ ID NO:19, SEQ ID NO:20, SEQ ID NO:21, SEQ ID NO:22, SEQ ID NO:23, SEQ ID NO:24, SEQ ID NO:51, SEQ ID NO:58, SEQ ID NO:65, SEQ ID NO:72, SEQ ID NO:79, SEQ ID NO:83, SEQ ID NO:90, SEQ ID NO:97, SEQ ID NO:104, SEQ ID NO:108, SEQ ID NO: 112, SEQ ID NO: 119, SEQ ID NO:126, SEQ ID NO:133, or SEQ ID NO:140. In certain embodiments, the arenavirus L as described herein comprises an amino acid sequence that is 90% identical to the amino acid sequence of SEQ ID NO:19, SEQ ID NO:20, SEQ ID NO:21, SEQ ID NO:22, SEQ ID NO:23, SEQ ID NO:24, SEQ ID NO:51, SEQ ID NO:58, SEQ ID NO:65, SEQ ID NO:72, SEQ ID NO:79, SEQ ID NO:83, SEQ ID NO:90, SEQ ID NO:97, SEQ ID NO:104, SEQ ID NO:108, SEQ ID NO: 112, SEQ ID NO: 119, SEQ ID NO:126, SEQ ID NO:133, or SEQ ID NO:140. In certain embodiments, the arenavirus L as described herein comprises an amino acid sequence that is 95% identical to the amino acid sequence of SEQ ID NO:19, SEQ ID NO:20, SEQ ID NO:21, SEQ ID NO:22, SEQ ID NO:23, SEQ ID NO:24, SEQ ID NO:51, SEQ ID NO:58, SEQ ID NO:65, SEQ ID NO:72, SEQ ID NO:79, SEQ ID NO:83, SEQ ID NO:90, SEQ ID NO:97, SEQ ID NO:104, SEQ ID NO:108, SEQ ID NO:112, SEQ ID NO:119, SEQ ID NO:126, SEQ ID NO:133, or SEQ ID NO:140. In certain embodiments, the arenavirus L as described herein comprises an amino acid sequence that is 96% identical to the amino acid sequence of SEQ ID NO:19, SEQ ID NO:20, SEQ ID NO:21, SEQ ID NO:22, SEQ ID NO:23, SEQ ID NO:24, SEQ ID NO:51, SEQ ID NO:58, SEQ ID NO:65, SEQ ID NO:72, SEQ ID NO:79, SEQ ID NO:83, SEQ ID NO:90, SEQ ID NO:97, SEQ ID NO:104, SEQ ID NO:108, SEQ ID NO: 112, SEQ ID NO: 119, SEQ ID NO:126, SEQ ID NO:133, or SEQ ID NO:140. In certain embodiments, the arenavirus L as described herein comprises an amino acid sequence that is 97% identical to the amino acid sequence of SEQ ID NO:19, SEQ ID NO:20, SEQ ID NO:21, SEQ ID NO:22, SEQ ID NO:23, SEQ ID NO:24, SEQ ID NO:51, SEQ ID NO:58, SEQ ID NO:65, SEQ ID NO:72, SEQ ID NO:79, SEQ ID NO:83, SEQ ID NO:90, SEQ ID NO:97, SEQ ID NO:104, SEQ ID NO:108, SEQ ID NO: 112, SEQ ID NO: 119, SEQ ID NO:126, SEQ ID NO:133, or SEQ ID NO:140. In certain embodiments, the arenavirus L as described herein comprises an amino acid sequence that is 98% identical to the amino acid sequence of SEQ ID NO:19, SEQ ID NO:20, SEQ ID NO:21, SEQ ID NO:22, SEQ ID NO:23, SEQ ID NO:24, SEQ ID NO:51, SEQ ID NO:58, SEQ ID NO:65, SEQ ID NO:72, SEQ ID NO:79, SEQ ID NO:83, SEQ ID NO:90, SEQ ID NO:97, SEQ ID NO:104, SEQ ID NO:108, SEQ ID NO: 112, SEQ ID NO: 119, SEQ ID NO:126, SEQ ID NO:133, or SEQ ID NO:140. In certain embodiments, the arenavirus L as described herein comprises an amino acid sequence that is 99% identical to the amino acid sequence of SEQ ID NO:19, SEQ ID NO:20, SEQ ID NO:21, SEQ ID NO:22, SEQ ID NO:23, SEQ ID NO:24, SEQ ID NO:51, SEQ ID NO:58, SEQ ID NO:65, SEQ ID NO:72, SEQ ID NO:79, SEQ ID NO:83, SEQ ID NO:90, SEQ ID NO:97, SEQ ID NO:104, SEQ ID NO:108, SEQ ID NO: 112, SEQ ID NO: 119, SEQ ID NO:126, SEQ ID NO:133, or SEQ ID NO:140.

### 5.5.2 Arenavirus Genomic or Antigenomic Segments of the Arenavirus Particle Provided Herein

[0375] In certain embodiments, the arenavirus particle is bi-segmented, namely consists of two arenavirus genomic or antigenomic segments. In certain embodiments, the two arenavirus genomic or antigenomic segments are one S segment and one L segment. In certain embodiments, the arenavirus particle is tri-segmented, namely consists of three arenavirus genomic or antigenomic segments. In certain embodiments, the three arenavirus genomic or antigenomic segments are two S segments and one L segment. In other embodiments, the three arenavirus genomic or antigenomic segments are one S segment and two L segments.

[0376] In certain embodiments, the genome of the arenavirus particle may consist of a) an S segment that encodes a heterologous non-arenaviral signal peptide, arenavirus GP1 and arenavirus GP2 under the control of 3′ UTR, and arenavirus GP signal peptide and a heterologous non-arenaviral polypeptide or arenavirus GP signal peptide alone under the control of 5′ UTR; b) an S segment that encodes NP under the control of 3′ UTR, and another heterologous non-arenaviral polypeptide or no polypeptide under the control of 5′ UTR; and c) an L segment that encodes L protein under the control of 3′ UTR, and Z protein under the control of 5′ UTR. In certain embodiments, the two heterologous non-arenaviral polypeptides are the same. In other embodiments, the two heterologous non-arenaviral polypeptides are different from each other. In certain embodiments, the genome of the arenavirus particle may consist of arenavirus genomic or antigenomic segments depicted in FIG. 4A.

[0377] In certain embodiments, the genome of the arenavirus particle may consist of a) an S segment that encodes a heterologous non-arenaviral polypeptide or no polypeptide under the control of 3′ UTR, and arenavirus GP signal peptide and a heterologous non-arenaviral polypeptide or arenavirus GP signal peptide alone under the control of 5′ UTR; b) an S segment that encodes NP under the control of 3′ UTR, and a heterologous non-arenaviral signal peptide, arenavirus GP1 and arenavirus GP2 under the control of 5′ UTR; and c) an L segment that encodes L protein under the control of 3′ UTR, and Z protein under the control of 5′ UTR. In certain embodiments, the two heterologous non-arenaviral polypeptides are the same. In other embodiments, the two heterologous non-arenaviral polypeptides are different from each other. In certain embodiments, the genome of the arenavirus particle may consist of arenavirus genomic or antigenomic segments depicted in FIG. 4B.

[0378] In certain embodiments, the genome of the arenavirus particle may consist of a) an S segment that encodes arenavirus GP signal peptide and a heterologous non-arenaviral polypeptide or an arenavirus GP signal peptide alone under the control of 3′ UTR, and a heterologous non-arenaviral signal peptide, arenavirus GP1 and arenavirus GP2 under the control of 5′ UTR; b) an S segment that encodes NP under the control of 3′ UTR, and another heterologous non-arenaviral polypeptide or no polypeptide under the control of 5′ UTR; and c) an L segment that encodes L protein under the control of 3′ UTR, and Z protein under the control of 5′ UTR. In certain embodiments, the two heterologous non-arenaviral polypeptides are the same. In other embodiments, the two heterologous non-arenaviral polypeptides are different from each other. In certain embodiments, the genome of the arenavirus particle may consist of arenavirus genomic or antigenomic segments depicted in FIG. 4C.

[0379] In certain embodiments, the genome of the arenavirus particle may consist of a) an S segment that encodes a heterologous non-arenaviral polypeptide or no polypeptide under the control of 3′ UTR, and a heterologous non-arenaviral signal peptide, arenavirus GP1 and arenavirus GP2 under the control of 5′ UTR; b) an S segment that encodes NP under the control of 3′ UTR, and arenavirus GP signal peptide and a heterologous non-arenaviral polypeptide or arenavirus GP signal peptide alone under the control of 5′ UTR; and c) an L segment that encodes L protein under the control of 3′ UTR, and Z protein under the control of 5′ UTR. In certain embodiments, the two heterologous non-arenaviral polypeptides are the same. In other embodiments, the two heterologous non-arenaviral polypeptides are different from each other. In certain embodiments, the genome of the arenavirus particle may consist of arenavirus genomic or antigenomic segments depicted in FIG. 4D.

[0380] In certain embodiments, the genome of the arenavirus particle may consist of a) an S segment that encodes arenavirus GP signal peptide and a heterologous non-arenaviral polypeptide or arenavirus GP signal peptide alone under the control of 3′ UTR, and another heterologous non-arenaviral polypeptide or no polypeptide under the control of 5′ UTR; b) an S segment that encodes NP under the control of 3′ UTR, and a heterologous non-arenaviral signal peptide, arenavirus GP1 and arenavirus GP2 under the control of 5′ UTR; and c) an L segment that encodes L protein under the control of 3′ UTR, and Z protein under the control of 5′ UTR. In certain embodiments, the two heterologous non-arenaviral polypeptides are the same. In other embodiments, the two heterologous non-arenaviral polypeptides are different from each other. In certain embodiments, the genome of the arenavirus particle may consist of arenavirus genomic or antigenomic segments depicted in FIG. 4E.

[0381] In certain embodiments, the genome of the arenavirus particle may consist of a) an S segment that encodes a heterologous non-arenaviral signal peptide, arenavirus GP1 and arenavirus GP2 under the control of 3′ UTR, and a heterologous non-arenaviral polypeptide or no polypeptide under the control of 5′ UTR; b) an S segment that encodes NP under the control of 3′ UTR, and arenavirus GP signal peptide and a heterologous non-arenaviral polypeptide or arenavirus GP signal peptide alone under the control of 5′ UTR; and c) an L segment that encodes L protein under the control of 3′ UTR, and Z protein under the control of 5′ UTR. In certain embodiments, the two heterologous non-arenaviral polypeptides are the same. In other embodiments, the two heterologous non-arenaviral polypeptides are different from each other. In certain embodiments, the genome of the arenavirus particle may consist of arenavirus genomic or antigenomic segments depicted in FIG. 4F.

[0382] In certain embodiments, the arenavirus particle comprising the nucleotide sequence described herein is infectious and replication competent. In certain embodiments, the arenavirus particle comprising the nucleotide sequence described herein is attenuated as compared to its parental virus. In certain embodiments, the arenavirus particle comprising the nucleotide sequence described herein is infectious but unable to produce further infectious progeny in non-complementing cells.

[0383] In certain embodiments, the genome of a bi-segmented arenavirus particle may consist of four positions in the arenavirus genomic or antigenomic segments, for example, position 1 is under the control of an arenavirus S segment 5′ UTR; position 2 is under the control of an arenavirus S segment 3′ UTR; position 3 is under the control of an arenavirus L segment 5′ UTR; position 4 is under the control of an arenavirus L segment 3′ UTR. In certain embodiments, positions 1-4 may encode the same polypeptide in two or more positions. In other embodiments, positions 1-4 may each encode a different polypeptide. In certain embodiments, the bi-segmented arenavirus particle comprising positions 1-4 in the arenavirus genomic or antigenomic segments is replication competent. In other embodiments, the bi-segmented arenavirus particle comprising positions 1-4 in the arenavirus genomic or antigenomic segments is replication-defective.

[0384] In certain embodiments, the genome of a tri-segmented arenavirus particle may consist of six positions in the arenavirus genomic or antigenomic segments, for example, position 1 is under the control of an arenavirus S segment 5′ UTR; position 2 is under the control of an arenavirus S segment 3′ UTR; position 3 is under the control of an arenavirus S segment 5′ UTR; position 4 under the control of an arenavirus S segment 3′ UTR; position 5 is under the control of an arenavirus L segment 5′ UTR; position 6 is under the control of an arenavirus L segment 3′ UTR. In certain embodiments, positions 1-6 may encode the same polypeptide in two or more positions. In other embodiments, positions 1-6 may each encode a different polypeptide. In certain embodiments, the tri-segmented arenavirus particle comprising positions 1-6 in the arenavirus genomic or antigenomic segments is replication competent. In other embodiments, the tri-segmented arenavirus particle comprising positions 1-6 in the arenavirus genomic or antigenomic segments is replication-defective.

[0385] In certain embodiments, position 1 encodes a heterologous non-arenaviral signal peptide, arenavirus GP1 and GP2. In certain embodiments, position 1 encodes 1) arenavirus GP signal peptide and a heterologous non-arenaviral polypeptide; 2) arenavirus GP signal peptide alone; or 3) arenavirus GP signal peptide and NP, Z or L. In certain embodiments, position 1 encodes a heterologous non-arenaviral polypeptide. In certain embodiments, position 1 encodes NP. In certain embodiments, position 1 encodes Z. In certain embodiments, position 1 encodes L. In certain embodiments, position 1 does not encode a polypeptide.

[0386] In certain embodiments, position 2 encodes a heterologous non-arenaviral signal peptide, arenavirus GP1 and GP2. In certain embodiments, position 2 encodes 1) arenavirus GP signal peptide and a heterologous non-arenaviral polypeptide; 2) arenavirus GP signal peptide alone; or 3) arenavirus GP signal peptide and NP, Z or L. In certain embodiments, position 2 encodes a heterologous non-arenaviral polypeptide. In certain embodiments, position 2 encodes NP. In certain embodiments, position 2 encodes Z. In certain embodiments, position 2 encodes L. In certain embodiments, position 2 does not encode a polypeptide.

[0387] In certain embodiments, position 3 encodes a heterologous non-arenaviral signal peptide, arenavirus GP1 and GP2. In certain embodiments, position 3 encodes 1) arenavirus GP signal peptide and a heterologous non-arenaviral polypeptide; 2) arenavirus GP signal peptide alone; or 3) arenavirus GP signal peptide and NP, Z or L. In certain embodiments, position 3 encodes a heterologous non-arenaviral polypeptide. In certain embodiments, position 3 encodes NP. In certain embodiments, position 3 encodes Z. In certain embodiments, position 3 encodes L. In certain embodiments, position 3 does not encode a polypeptide.

[0388] In certain embodiments, position 4 encodes a heterologous non-arenaviral signal peptide, arenavirus GP1 and GP2. In certain embodiments, position 4 encodes 1) arenavirus GP signal peptide and a heterologous non-arenaviral polypeptide; 2) arenavirus GP signal peptide alone; or 3) arenavirus GP signal peptide and NP, Z or L. In certain embodiments, position 4 encodes a heterologous non-arenaviral polypeptide. In certain embodiments, position 4 encodes NP. In certain embodiments, position 4 encodes Z. In certain embodiments, position 4 encodes L. In certain embodiments, position 4 does not encode a polypeptide.

[0389] In certain embodiments, position 5 encodes a heterologous non-arenaviral signal peptide, arenavirus GP1 and GP2. In certain embodiments, position 5 encodes 1) arenavirus GP signal peptide and a heterologous non-arenaviral polypeptide; 2) arenavirus GP signal peptide alone; or 3) arenavirus GP signal peptide and NP, Z or L. In certain embodiments, position 5 encodes a heterologous non-arenaviral polypeptide. In certain embodiments, position 5 encodes NP. In certain embodiments, position 5 encodes Z. In certain embodiments, position 5 encodes L. In certain embodiments, position 5 does not encode a polypeptide.

[0390] In certain embodiments, position 6 encodes a heterologous non-arenaviral signal peptide, arenavirus GP1 and GP2. In certain embodiments, position 6 encodes 1) arenavirus GP signal peptide and a heterologous non-arenaviral polypeptide; 2) arenavirus GP signal peptide alone; or 3) arenavirus GP signal peptide and NP, Z or L. In certain embodiments, position 6 encodes a heterologous non-arenaviral polypeptide. In certain embodiments, position 6 encodes NP. In certain embodiments, position 6 encodes Z. In certain embodiments, position 6 encodes L. In certain embodiments, position 6 does not encode a polypeptide.

[0391] In certain embodiments, the arenavirus particle is derived from a Lymphocytic choriomeningitis virus (LCMV). In certain embodiments, the LCMV is a MP strain, an Armstrong strain, or an Armstrong Clone 13 strain. In other embodiments, the arenavirus particle is derived from a Lassa virus. In certain embodiments, the arenavirus particle is derived from a Pichinde virus (PICV). In certain embodiments, the arenavirus particle is derived from a Junin virus vaccine Candid #1, or a Junin virus vaccine XJ Clone 3 strain. In certain embodiments, the arenavirus particle is derived from an Oliveros virus. In certain embodiments, the arenavirus particle is derived from a Tamiami virus. In certain embodiments, the arenavirus particle is derived from a Mobala virus. In certain embodiments, the arenavirus particle is derived from a Mopeia virus. In certain embodiments, the arenavirus particle is derived from an Ippy virus. In certain embodiments, the arenavirus particle is derived from an Amapari virus. In certain embodiments, the arenavirus particle is derived from a Flexal virus. In certain embodiments, the arenavirus particle is derived from a Guanarito virus. In certain embodiments, the arenavirus particle is derived from a Latino virus. In certain embodiments, the arenavirus particle is derived from a Machupo virus. In certain embodiments, the arenavirus particle is derived from a Parana virus. In certain embodiments, the arenavirus particle is derived from a Pirital virus. In certain embodiments, the arenavirus particle is derived from a Sabia virus. In certain embodiments, the arenavirus particle is derived from a Tacaribe virus. In certain embodiments, the arenavirus particle is derived from a Bear Canyon virus. In certain embodiments, the arenavirus particle is derived from a Whitewater Arroyo virus. In certain embodiments, the arenavirus particle is derived from a Allpahuayo virus (ALLV). In certain embodiments, the arenavirus particle is derived from an Alxa virus. In certain embodiments, the arenavirus particle is derived from a Chapare virus. In certain embodiments, the arenavirus particle is derived from a Lijiang virus. In certain embodiments, the arenavirus particle is derived from a Cupixi virus. In certain embodiments, the arenavirus particle is derived from a Gairo virus. In certain embodiments, the arenavirus particle is derived from a Loei River virus. In certain embodiments, the arenavirus particle is derived from a Lujo virus. In certain embodiments, the arenavirus particle is derived from a Luna virus. In certain embodiments, the arenavirus particle is derived from a Luli virus. In certain embodiments, the arenavirus particle is derived from a Lunk virus. In certain embodiments, the arenavirus particle is derived from a Mariental virus. In certain embodiments, the arenavirus particle is derived from a Merino Walk virus. In certain embodiments, the arenavirus particle is derived from a Morogoro virus. In certain embodiments, the arenavirus particle is derived from an Okahandja virus. In certain embodiments, the arenavirus particle is derived from an Aporé virus. In certain embodiments, the arenavirus particle is derived from a Ryukyu virus. In certain embodiments, the arenavirus particle is derived from a Solwezi virus. In certain embodiments, the arenavirus particle is derived from a souris virus. In certain embodiments, the arenavirus particle is derived from a Wenzhou virus. In certain embodiments, the arenavirus particle is derived from a Big Brushy Tank virus. In certain embodiments, the arenavirus particle is derived from a Catarina virus. In certain embodiments, the arenavirus particle is derived from a Skinner Tank virus. In certain embodiments, the arenavirus particle is derived from a Tonto Creek virus. In certain embodiments, the arenavirus particle is derived from a Xapuri virus.

[0392] In certain embodiments, the growth or infectivity of the arenavirus particle described herein is not inferior to a second arenavirus particle carrying one or more of the same heterologous non-arenaviral polypeptides, and all arenaviral GP, NP, Z and L in the second arenavirus particle are each expressed as one ORF.

[0393] In certain embodiments, the arenavirus particle comprising the nucleotide sequence described herein is infectious and replication competent. In certain embodiments, the arenavirus particle comprising the nucleotide sequence described herein is attenuated as compared to its parental virus. In certain embodiments, the arenavirus particle comprising the nucleotide sequence described herein is infectious but unable to produce further infectious progeny in non-complementing cells.

### 5.5.3 Compositions and Methods Related to the Nucleotide Sequence Provided Herein

[0394] In certain embodiments, provided herein is a translation product of the mRNA transcripts of the genome of the arenavirus particle provided herein.

[0395] In certain embodiments, provided herein is a cDNA of the mRNA transcript of the genome of the arenavirus particle provided herein, wherein the cDNA can be transcribed into an arenavirus genomic or antigenomic segment.

[0396] In certain embodiments, provided herein is a method of producing an arenavirus genomic or antigenomic segment, wherein the method comprises transcribing the cDNA provided herein.

[0397] In certain embodiments, provided herein is a method of generating an arenavirus particle, wherein the method comprises:
[0398] a) transfecting into a host cell one or more cDNA of the mRNA transcript of the genome of the arenavirus particle provided herein or one or more RNA sequences each transcribed in vitro from the cDNA of the mRNA transcript of the genome of the arenavirus particle provided herein;
[0399] b) transfecting into the host cell nucleotide sequences encoding arenavirus trans-acting factors;
[0400] c) maintaining the host cell under conditions suitable for virus formation; and
[0401] d) harvesting the arenavirus particle.

[0402] In certain embodiments, the one or more cDNA sequences are transcribed using a bidirectional promoter. In certain embodiments, the one or more cDNA sequences are transcribed under the control of a promoter selected from the group consisting of:
[0403] a) a RNA polymerase I promoter;
[0404] b) a RNA polymerase II promoter; and
[0405] c) a T7 promoter.

[0406] In certain embodiments, provided herein is a DNA expression vector comprising the DNA sequence encoding the mRNA transcript of the genome of the arenavirus particle provided herein.

[0407] In certain embodiments, provided herein is a method of rescuing an arenavirus particle using the mRNA transcript of the genome of the arenavirus particle provided herein or the cDNA sequence thereof.

[0408] In certain embodiments, provided herein is a host cell comprising the arenavirus particle provided herein, the translation product provided herein, the cDNA provided herein, or the DNA expression vector provided herein.

[0409] In certain embodiments, provided herein is a vaccine comprising the arenavirus particle provided herein, the translation product provided herein, the cDNA provided herein, or the DNA expression vector provided herein, and a pharmaceutically acceptable carrier.

[0410] In certain embodiments, provided herein is a pharmaceutical composition comprising the arenavirus particle provided herein, the translation product provided herein, the cDNA provided herein, or the DNA expression vector provided herein, and a pharmaceutically acceptable carrier.

### 5.6 Arenavirus Genomic or Antigenomic Segments Provided Herein

[0411] In another aspect, provided herein are arenavirus genomic or antigenomic segments. In certain embodiments, provided herein is an arenavirus genomic or antigenomic segment engineered such that the viral transcription thereof results in a first mRNA transcript and a second mRNA transcript, wherein the first mRNA transcript comprises a nucleotide sequence encoding a functional fragment of a first polypeptide, and the first mRNA transcript does not encode the full-length first polypeptide;

wherein the second mRNA transcript comprises a nucleotide sequence encoding:
[0412] a) a second polypeptide; or
[0413] b) a functional fragment of the first polypeptide, and the second mRNA transcript does not encode the full-length first polypeptide; or
[0414] c) a functional fragment of a second polypeptide, and the second mRNA transcript does not encode the full-length second polypeptide; or
[0415] d) a heterologous non-arenaviral polypeptide; and
   wherein the first and second polypeptides are different from each other and selected from the group consisting of arenavirus GP, NP, Z and L.

[0416] In certain embodiments, the first mRNA transcript further comprises a nucleotide sequence encoding a second heterologous non-arenaviral polypeptide or a third polypeptide, wherein the third polypeptide is different from the first polypeptide and the second polypeptide and is selected from the group consisting of arenavirus GP, NP, Z and L; and wherein the heterologous non-arenaviral polypeptide and the second heterologous non-arenaviral polypeptide are the same or different from each other.

[0417] In certain embodiments, the second mRNA transcript further comprises a nucleotide sequence encoding a second heterologous non-arenaviral polypeptide or a third polypeptide, wherein the third polypeptide is different from the first polypeptide and the second polypeptide and is selected from the group consisting of arenavirus GP, NP, Z and L; and wherein the heterologous non-arenaviral polypeptide and the second heterologous non-arenaviral polypeptide are the same or different from each other.

[0418] In certain embodiments, the arenavirus GP, NP, Z and L are from LCMV, Lassa virus, Pichinde virus, Oliveros virus, Tamiami virus, Mobala virus, Mopeia virus, Ippy virus, Amapari virus, Flexal virus, Guanarito virus, Latino virus, Machupo virus, Parana virus, Pirital virus, Sabia virus, Tacaribe virus, Bear Canyon virus, Whitewater Arroyo virus, Allpahuayo virus (ALLV), Alxa virus, Chapare virus, Lijiang virus, Cupixi virus, Gairo virus, Loei River virus, Lujo virus, Luna virus, Luli virus, Lunk virus, Mariental virus, Merino Walk virus, Morogoro virus, Okahandja virus, Aporé virus, Ryukyu virus, Solwezi virus, souris virus, Wenzhou virus, Big Brushy Tank virus, Catarina virus, Skinner Tank virus, Tonto Creek virus, Xapuri virus, or Junin virus.

[0419] In certain embodiments, provided herein is an arenavirus genomic or antigenomic segment engineered such that the viral transcription thereof results in an mRNA transcript encoding:
[0420] a) a functional fragment of a first polypeptide, and
[0421] b) a heterologous non-arenaviral polypeptide or a second polypeptide;
   wherein the mRNA transcript does not encode the full-length first polypeptide; and wherein the first and second polypeptides are different from each other and selected from the group consisting of arenavirus GP, NP, Z and L.

[0422] In certain embodiments, the mRNA transcript is a first mRNA transcript and the viral transcription of the arenavirus genomic or antigenomic segment further results in a second mRNA transcript. In certain embodiments, the second mRNA transcript comprises a nucleotide sequence encoding a third polypeptide; a functional fragment of a third polypeptide; a functional fragment of the first polypeptide; or a second heterologous non-arenaviral polypeptide; wherein the third polypeptide is different from the first and the second polypeptide and selected from the group consisting of arenavirus GP, NP, Z and L, wherein the second mRNA transcript does not encode the full-length first polypeptide; wherein the second mRNA transcript does not encode the full-length third polypeptide; and wherein the heterologous non-arenaviral polypeptide and the second heterologous non-arenaviral polypeptide are the same or different from each other.

[0423] In certain embodiments, the second mRNA transcript comprises a nucleotide sequence encoding a functional fragment of a first polypeptide, and the functional fragment encoded by the first mRNA transcript is different from the functional fragment encoded by the second mRNA transcript.

[0424] In certain embodiments, the viral transcription of the arenavirus genomic or antigenomic segment does not further result in a second mRNA transcript.

[0425] In certain embodiments, the mRNA transcript comprises an internal ribosome entry site (IRES).

[0426] In certain embodiments, the arenavirus genomic or antigenomic segment is an S segment. In certain embodiments, the arenavirus genomic or antigenomic segment is an L segment.

[0427] In certain embodiments, the functional fragment is under control of an arenavirus 3′ UTR. In certain embodiments, the functional fragment is under control of an arenavirus 5′ UTR.

[0428] In certain embodiments, the first, second and third polypeptides each comprises an amino acid sequence that is at least 80%, 85%, 90%, 95%, 96%, 97%, 98%, 99% or 100% identical to the amino acid sequence of SEQ ID NO:1, SEQ ID NO:2, SEQ ID NO:3, SEQ ID NO:4, SEQ ID NO:5, SEQ ID NO:6, SEQ ID NO:7, SEQ ID NO:8, SEQ ID NO:9, SEQ ID NO:10, SEQ ID NO: 11, SEQ ID NO:12, SEQ ID NO:13, SEQ ID NO:14, SEQ ID NO:15, or SEQ ID NO:16, SEQ ID NO:17, SEQ ID NO:18, SEQ ID NO:19, SEQ ID NO:20, SEQ ID NO:21, SEQ ID NO:22, SEQ ID NO:23, SEQ ID NO:24, SEQ ID NO:48, SEQ ID NO:52, SEQ ID NO:59, SEQ ID NO:66, SEQ ID NO:73, SEQ ID NO:80, SEQ ID NO:84, SEQ ID NO:91, SEQ ID NO:98, SEQ ID NO:105, SEQ ID NO:109, SEQ ID NO:113, SEQ ID NO:120, SEQ ID NO:127, SEQ ID NO:134, SEQ ID NO:49, SEQ ID NO:56, SEQ ID NO:63, SEQ ID NO:70, SEQ ID NO:77, SEQ ID NO:81, SEQ ID NO:88, SEQ ID NO:95, SEQ ID NO:102, SEQ ID NO:106, SEQ ID NO:110, SEQ ID NO: 117, SEQ ID NO:124, SEQ ID NO:131, SEQ ID NO:138, SEQ ID NO:50, SEQ ID NO:57, SEQ ID NO:64, SEQ ID NO:71, SEQ ID NO:78, SEQ ID NO:82, SEQ ID NO:89, SEQ ID NO:96, SEQ ID NO:103, SEQ ID NO:107, SEQ ID NO:111, SEQ ID NO: 118, SEQ ID NO:125, SEQ ID NO:132, SEQ ID NO:139, SEQ ID NO:51, SEQ ID NO:58, SEQ ID NO:65, SEQ ID NO:72, SEQ ID NO:79, SEQ ID NO:83, SEQ ID NO:90, SEQ ID NO:97, SEQ ID NO:104, SEQ ID NO:108, SEQ ID NO: 112, SEQ ID NO: 119, SEQ ID NO:126, SEQ ID NO:133, or SEQ ID NO:140.

[0429] In certain embodiments, the first polypeptide comprises an amino acid sequence identical to SEQ ID NO:1, SEQ ID NO:2, SEQ ID NO:3, or SEQ ID NO:4, SEQ ID NO:5, SEQ ID NO:6, SEQ ID NO:48, SEQ ID NO:52, SEQ ID NO:59, SEQ ID NO:66, SEQ ID NO:73, SEQ ID NO:80, SEQ ID NO:84, SEQ ID NO:91, SEQ ID NO:98, SEQ ID NO:105, SEQ ID NO:109, SEQ ID NO: 113, SEQ ID NO:120, SEQ ID NO:127, or SEQ ID NO:134.

[0430] In certain embodiments, the functional fragment of the first polypeptide comprises an amino acid sequence that is at least 80%, 85%, 90%, 95%, 96%, 97%, 98%, 99% or 100% identical to the amino acid sequence of SEQ ID NO:25, SEQ ID NO:26, SEQ ID NO:27, SEQ ID NO:28, SEQ ID NO:29, SEQ ID NO:30, SEQ ID NO:31, SEQ ID NO:32, SEQ ID NO:33, SEQ ID NO:142, SEQ ID NO:34, SEQ ID NO:35, SEQ ID NO:36, SEQ ID NO:37, SEQ ID NO:38, SEQ ID NO:39, SEQ ID NO:40, SEQ ID NO:41, SEQ ID NO:42, SEQ ID NO:53, SEQ ID NO:60, SEQ ID NO:67, SEQ ID NO:74, SEQ ID NO:85, SEQ ID NO:92, SEQ ID NO:99, SEQ ID NO:114, SEQ ID NO:121, SEQ ID NO:128, SEQ ID NO:135, SEQ ID NO:54, SEQ ID NO:61, SEQ ID NO:68, SEQ ID NO:75, SEQ ID NO:86, SEQ ID NO:93, SEQ ID NO:100, SEQ ID NO:115, SEQ ID NO:122, SEQ ID NO:129, SEQ ID NO:136, SEQ ID NO:55, SEQ ID NO:62, SEQ ID NO:69, SEQ ID NO:76, SEQ ID NO:87, SEQ ID NO:94, SEQ ID NO:101, SEQ ID NO:116, SEQ ID NO:123, SEQ ID NO:130, or SEQ ID NO:137.

[0431] In certain embodiments, the functional fragment is an arenavirus GP signal peptide or a functional fragment thereof.

[0432] In certain embodiments, the heterologous non-arenaviral polypeptide, the second heterologous non-arenaviral polypeptide, or both heterologous non-arenaviral polypeptides are each an antigen derived from an infectious organism, tumor, or allergen. In certain embodiments, the antigen is selected from the group consisting of

(a) viral antigens, and the viral antigen is from a virus family selected from the group consisting of adenoviridae, herpesviridae, leviviridae, orthomyxoviridae, parvoviridae, filoviridae, hantaviridae, poxviridae, papillomaviridae, polyomaviridae, paramyxoviridae, pneumoviridae, picornaviridae, reoviridae, retroviridae, flaviviridae, hepadnaviridae, togaviridae, rhabdoviridae, arenaviridae, and coronaviridae;
(b) bacterial antigens, and the bacterial antigen is from a bacteria family selected from the group consisting of Aquaspirillum family, Azospirillum family, Azotobacteraceae family, Bacteroidaceae family, Bartonellaceae family, Bdellovibrio family, Campylobacteraceae family, Chlamydiaceae family, Clostridiaceae family, Enterobacteriaceae family, Gardinella family, Pasteurellaceae family, Halobacteriaceae family, Helicobacter family, Legionallaceae family, Listeriaceae family, Methylococcaceae family, mycobacteriaceae, Neisseriaceae family, Oceanospirillum family, Pasteurellaceae family, Streptococcaceae family, Pseudomonadaceae family, Rhizobiaceae family, Spirillum family, Spirosomaceae family, Staphylococcaceae family, Helicobacter family, Yersinia family, Bacillus antracis and Vampirovibrio family, and
(c) tumor neoantigens or neo-epitopes and tumor associated antigens; and the tumor associated antigen is selected from the group consisting of artificial fusion protein of HPV 16 E7 and E6 proteins, oncogenic viral antigens, cancer-testis antigens, oncofetal antigens, tissue differentiation antigens, mutant protein antigens, Adipophilin, AIM-2, ALDHIAI, BCLX (L), BING-4, CALCA, CD45, CPSF, cyclin DI, DKKI, ENAH (hMcna), Ga733 (EpCAM), EphA3, EZH2, FGF5, glypican-3, G250/MN/CAIX, HER-2/neu, IDOI, IGF2B3, IL13Ralpha2, Intestinal carboxyl esterase, alphafoetoprotein, Kallikrein 4, KIF20A, Lengsin, M-CSF, MCSP, mdm-2, Meloe, MMP-2, MMP-7, MUCl, MUC5AC, p53 (non-mutant), PAX5, PBF, PRAME, PSMA, RAGE, RAGE-I, RGS5, RhoC, RNF43, RU2AS, secernin 1, SOX10, STEAPI (six-transmembrane epithelial antigen of the prostate 1), survivin, Telomerase, VEGF, WT1, EGF-R, CEA, CD20, CD33, CD52, MELANA/MART1, MART2, NY-ESO-1, p53, MAGE Al, MAGE A3, MAGE-4, MAGE-5, MAGE-6, CDK4, alpha-actinin-4, ARTC1, BCR-ABL, BCR-ABL fusion protein (b3a2), B-RAF, CASP-5, CASP-8, beta-catenin, Cdc27, CDK4, CDKN2A, CLPP, COA-1, dek-can fusion protein, EFTUD2, Elongation factor 2, ETV6-AML, ETV6-AML1 fusion protein, FLT3-ITD, FNl, GPNMB, LDLR-fucosyltransferase fusion protein, NFYC, OGT, OS-9, pml-RARalpha fusion protein, PRDX5, PTPRK, H-ras, K-ras (V-Ki-ras2 Kirsten rat sarcoma viral oncogene), N-ras, RBAF600, SIRT2, SNRPDl, SSX, SSX2, SYT-SSX1 or -SSX2 fusion protein, TGFbetaRII, Triosephosphate isomerase, ormdm-2, LMP2, HPV E6, HPV E7, EGFRvIII (epidermal growth factor variant III), Idiotype, GD2, ganglioside G2), Ras-mutant, p53 (mutant), Proteinase3 (PRI), Tyrosinase, PSA, hTERT, Sarcoma translocation breakpoints, EphA2, prostatic acid phosphatase PAP, neo-PAP, ML-IAP, AFP, ERG (TMPRSS2 ETS Fusion gene), NAI 7, PAX3, ALK, Androgen Receptor, Cyclin B1, Polysialic acid, MYCN, TRP2, TRP2-Int2, GD3, Fucosyl GMI, Mesothelin, PSCA, sLe(a), cyp1B1, PLACI, GM3, BORIS, Tn, GLoboH, NY-BR-I, SART3, STn, Carbonic Anhydrase IX, OY-TESI, Sperm protein 17, LCK, high molecular weight melanoma-associated antigen (HMWMAA), AKAP-4, SSX2, XAGE 1, B7H3, Legumain, Tie 2, Page4, VEGFR2, MAD-CT-I, FAP, PDGFR-beta, MADCT-2, For-related antigen 1, TRPI, GP100, CA-125, CA19-9, Calretinin, Epithelial membrane antigen (EMA), Epithelial tumor antigen (ETA), CD19, CD34, CD99, CDI 17, Chromogranin, Cytokeratin, Desmin, Glial fibrillary acidic protein (GFAP), gross cystic disease fluid protein (GCDFP-15), HMB-45 antigen, Myo-D1, muscle-specific actin (MSA), neurofilament, neuronspecific enolase (NSE), placental alkaline phosphatase, synaptophysis, thyroglobulin, thyroid transcription factor-1, dimeric form of the pyruvate kinase isoenzyme type M2 (tumor M2-PK), BAGE BAGE-1, CAGE, CTAGE, FATE, GAGE, GAGE-I, GAGE-2, GAGE-3, GAGE-4, GAGE-5, GAGE-6, GAGE-7, HCA661, HOM-TES-85, MAGEA, MAGEB, MAGEC, NA88, NY-SAR-35, SPANXBI, SPAI 7, SSX, SYCP1, TPTE, Carbohydrate/ganglioside GM2 (oncofetal antigen-immunogenic-1 OFA-I-1), GM3, CA 15-3 (CA 27.29\BCAA), CA 195, CA 242, CA 50, CAM 43, CEA, EBNA, EF2, Epstein-Barr virus antigen, HLA-A2, HLA-Al 1, HSP70-2, KIAAO205, MUM-I, MUM-2, MUM-3, Myosin class I, GnTV, Herv-K-mel, LAGE-I, LAGE-2, (sperm protein) SPI 7, SCP-I, P15(58), Hom/Mel-40, E2A-PRL, H4-RET, IGH-IGK, MYL-RAR, TSP-180, P185erbB2, p180erbB-3, c-met, nm-23H1, TAG-72, TAG-72-4, CA-72-4, CAM 17.1, NuMa, 13-catenin, P16, TAGE, CT7, 43-9F, 5T4, 791Tgp72, 13HCG, BCA225, BTAA, CD68\KP1, CO-029, HTgp-175, M344, MG7-Ag, MOV18, NB\70K, NYCO-1, RCAS1, SDCCAGi6, TA-90, TAAL6, TLP, TPS, CD22, CD27, CD30, CD70, prostein, TARP (T cell receptor gamma alternate reading frame protein), Trp-p8, integrin avβ3 (CD61), galactin, or Ral-B, CD123, CLL-1, CD38, CS-1, CD138, and ROR1.

[0433] In certain embodiments, the first mRNA transcript comprises a nucleotide sequence encoding arenavirus GP signal peptide, either alone or fused to a heterologous non-arenaviral polypeptide. In certain embodiments, the second mRNA transcript comprises a nucleotide sequence encoding a heterologous non-arenaviral signal peptide and the arenavirus GP1 and GP2. In certain embodiments, the first mRNA transcript is under control of an arenavirus 3′ UTR and the second mRNA transcript is under control of an arenavirus 5′ UTR.

[0434] In certain embodiments, the first mRNA transcript comprises a nucleotide sequence encoding arenavirus GP signal peptide, either alone or fused to a heterologous non-arenaviral polypeptide. In certain embodiments, the second mRNA transcript comprises a nucleotide sequence encoding a heterologous non-arenaviral polypeptide; wherein the heterologous non-arenaviral polypeptide encoded by the first mRNA transcript and the heterologous non-arenaviral polypeptide encoded by the second mRNA transcript are the same or different from each other. In certain embodiments, the first mRNA transcript is under control of an arenavirus 3′ UTR and the second mRNA transcript is under control of an arenavirus 5′ UTR.

[0435] In certain embodiments, the first mRNA transcript comprises a nucleotide sequence encoding a heterologous non-arenaviral signal peptide and the arenavirus GP1 and GP2. In certain embodiments, the second mRNA transcript comprises a nucleotide sequence encoding NP. In certain embodiments, the first mRNA transcript is under control of an arenavirus 5′ UTR and the second mRNA transcript is under control of an arenavirus 3′ UTR.

[0436] In certain embodiments, the heterologous non-arenaviral polypeptide is expressed under control of an arenavirus 3′ UTR or the second heterologous non-arenaviral polypeptide is expressed under control of an arenavirus 3′ UTR; and the expression level of the heterologous non-arenaviral polypeptide or the expression level of the second heterologous non-arenaviral polypeptide is at least about 1%, 2%, 3%, 4%, 5%, 6%, 7%, 8%, 9%, 10%, 15%, 20%, 30%, 40%, 50%, 60%, 70%, 80%, 90%, 100%, 1.5-fold, 2-fold, 3-fold, 4-fold, 5-fold, 6-fold, 7-fold, 8-fold, 9-fold, 10-fold, 12-fold, 15-fold, 18-fold, 20-fold, 25-fold, or 30-fold higher than the expression level of the same heterologous non-arenaviral polypeptide expressed under control of the respective arenavirus 5′ UTR or higher than the expression level of the same second heterologous non-arenaviral polypeptide expressed under control of the respective arenavirus 5′ UTR.

[0437] In certain embodiments, the expression of one heterologous non-arenaviral polypeptide is under control of an arenavirus 3′ UTR and the expression of the other heterologous non-arenaviral polypeptide is under control of an arenavirus 5′ UTR. In certain embodiments, the expression of one heterologous non-arenaviral polypeptide is under control of an arenavirus 3′ UTR in one S segment and the expression of the other heterologous non-arenaviral polypeptide is under control of an arenavirus 5′ UTR in the other S segment. In certain embodiments, cells that are infected with the arenavirus particle of the present disclosure (e.g., expressing one heterologous non-arenaviral polypeptide under control of an arenavirus 3′ UTR in one S segment and expressing another heterologous non-arenaviral polypeptide under control of an arenavirus 5′ UTR in another S segment) express (co-express) both heterologous non-arenaviral polypeptides. In certain embodiments, the combined expression level of the two heterologous non-arenaviral polypeptides (e.g., cells expressing both heterologous non-arenaviral polypeptides) is at least about 1%, 2%, 3%, 4%, 5%, 6%, 7%, 8%, 9%, 10%, 15%, 20%, 30%, 40%, 50%, 60%, 70%, 80%, 90%, 100%, 1.5-fold, 2-fold, 3-fold, 4-fold, 5-fold, 6-fold, 7-fold, 8-fold, 9-fold, 10-fold, 12-fold, 15-fold, 18-fold, 20-fold, 25-fold, or 30-fold higher than the combined expression level of the same two heterologous non-arenaviral polypeptides expressed under control of arenavirus 5′ UTRs (e.g., expression of one heterologous non-arenaviral polypeptide is under control of an arenavirus 5′ UTR of one S segment and expression of the other heterologous non-arenaviral polypeptide is under control of an arenavirus 5′ UTR of the other S segment). In certain embodiments, the combined expression level of the two heterologous non-arenaviral polypeptides (e.g., cells expressing both heterologous non-arenaviral polypeptides) is about 1%, 2%, 3%, 4%, 5%, 6%, 7%, 8%, 9%, 10%, 15%, 20%, 30%, 40%, 50%, 60%, 70%, 80%, 90%, 100%, 1.5-fold, 2-fold, 3-fold, 4-fold, 5-fold, 6-fold, 7-fold, 8-fold, 9-fold, 10-fold, 12-fold, 15-fold, 18-fold, 20-fold, 25-fold, or 30-fold higher than the combined expression level of the same two heterologous non-arenaviral polypeptides expressed under control of arenavirus 5′ UTRs (e.g., one heterologous non-arenaviral polypeptide expressed under control of an arenavirus 5′ UTR of one S segment and the other heterologous non-arenaviral polypeptide expressed under control of an arenavirus 5′ UTR of the other S segment). In certain embodiments, the combined expression level of the two heterologous non-arenaviral polypeptides (e.g., cells expressing both heterologous non-arenaviral polypeptides) is 1%, 2%, 3%, 4%, 5%, 6%, 7%, 8%, 9%, 10%, 15%, 20%, 30%, 40%, 50%, 60%, 70%, 80%, 90%, 100%, 1.5-fold, 2-fold, 3-fold, 4-fold, 5-fold, 6-fold, 7-fold, 8-fold, 9-fold, 10-fold, 12-fold, 15-fold, 18-fold, 20-fold, 25-fold, or 30-fold higher than the combined expression level of the same two heterologous non-arenaviral polypeptides expressed under control of arenavirus 5′ UTRs (e.g., one heterologous non-arenaviral polypeptide expressed under control of an arenavirus 5′ UTR of one S segment and the other heterologous non-arenaviral polypeptide expressed under control of an arenavirus 5′ UTR of the other S segment).

[0438] In certain embodiments, provided herein is an arenavirus genomic or antigenomic segment. In certain embodiments, the arenavirus genomic or antigenomic segment provided herein is the nucleotide sequence provided herein (see Section 5.4). In certain embodiments, the nucleotide sequence provided herein (see Section 5.4) is derived from the arenavirus genomic or antigenomic segment described in this Section. In certain embodiments, the transcription of the first ORF (see Section 5.4) may result in the first mRNA transcript described in this Section, whereas the transcription of the second ORF (see Section 5.4) may result in the second mRNA transcript described in the Section. In certain embodiments, the arenavirus particles provided herein (see Section 5.5) comprise the arenavirus genomic or antigenomic segment described in this section.

[0439] In certain embodiments, the arenavirus genomic or antigenomic segment is an S segment. In certain embodiments, the arenavirus genomic or antigenomic segment is an L segment. In certain embodiments, the functional fragment encoded by the arenavirus genomic or antigenomic segment is under control of a 3′ UTR. In other embodiments, the functional fragment encoded by the arenavirus genomic or antigenomic segment is under control of a 5′ UTR.

[0440] In certain embodiments, the first mRNA transcript comprises a nucleotide sequence encoding arenavirus GP signal peptide, either alone or fused to a heterologous non-arenaviral polypeptide, and the second mRNA transcript comprises a nucleotide sequence encoding a heterologous non-arenaviral signal peptide, arenavirus GP1 and arenavirus GP2; and the first mRNA transcript is under control of 5′ UTR and the second mRNA transcript is under control of 3′ UTR. In certain embodiments, the arenavirus genomic or antigenomic segment provided herein is one of the S1 segments depicted in FIG. 4A.

[0441] In certain embodiments, the first mRNA transcript comprises a nucleotide sequence encoding arenavirus GP signal peptide, either alone or fused to a heterologous non-arenaviral polypeptide, and the second mRNA transcript comprises a nucleotide sequence encoding a heterologous non-arenaviral polypeptide; and the first mRNA transcript is under control of 5′ UTR and the second mRNA transcript is under control of 3′ UTR. In certain embodiments, the first mRNA transcript comprises a nucleotide sequence encoding arenavirus GP signal peptide, either alone or fused to a heterologous non-arenaviral polypeptide, and there is no second mRNA transcript; and the first mRNA transcript is under control of 5′ UTR. In certain embodiments, the arenavirus genomic or antigenomic segment provided herein is one of the S1 segments depicted in FIG. 4B.

[0442] In certain embodiments, the first mRNA transcript comprises a nucleotide sequence encoding a heterologous non-arenaviral signal peptide, arenavirus GP1, and arenavirus GP2, and the second mRNA transcript comprises a nucleotide sequence encoding NP; and the first mRNA transcript is under control of 5′ UTR and the second mRNA transcript is under control of 3′ UTR. In certain embodiments, the arenavirus genomic or antigenomic segment provided herein is one of the S2 segments depicted in FIG. 4B or FIG. 4E.

[0443] In certain embodiments, the first mRNA transcript comprises a nucleotide sequence encoding arenavirus GP signal peptide, either alone or fused to a heterologous non-arenaviral polypeptide, and the second mRNA transcript comprises a nucleotide sequence encoding a heterologous non-arenaviral signal peptide, arenavirus GP1 and arenavirus GP2; and the first mRNA transcript is under control of 3′ UTR and the second mRNA transcript is under control of 5′ UTR. In certain embodiments, the arenavirus genomic or antigenomic segment provided herein is one of the S1 segments depicted in FIG. 4C.

[0444] In certain embodiments, the first mRNA transcript comprises a nucleotide sequence encoding a heterologous non-arenaviral signal peptide, arenavirus GP1, and arenavirus GP2, and the second mRNA transcript comprises a nucleotide sequence encoding a heterologous non-arenaviral polypeptide; and the first mRNA transcript is under control of 5′ UTR and the second mRNA transcript is under control of 3′ UTR. In certain embodiments, the first mRNA transcript comprises a nucleotide sequence encoding a heterologous non-arenaviral signal peptide, arenavirus GP1, and arenavirus GP2, and there is no second mRNA transcript; and the first mRNA transcript is under control of 5′ UTR. In certain embodiments, the arenavirus genomic or antigenomic segment provided herein is one of the S1 segments depicted in FIG. 4D.

[0445] In certain embodiments, the first mRNA transcript comprises a nucleotide sequence encoding arenavirus GP signal peptide, either alone or fused to a heterologous non-arenaviral polypeptide, and the second mRNA transcript comprises a nucleotide sequence encoding NP; and the first mRNA transcript is under control of 5′ UTR and the second mRNA transcript is under control of 3′ UTR. In certain embodiments, the arenavirus genomic or antigenomic segment provided herein is one of the S2 segments depicted in FIG. 4D or FIG. 4F.

[0446] In certain embodiments, the first mRNA transcript comprises a nucleotide sequence encoding arenavirus GP signal peptide, either alone or fused to a heterologous non-arenaviral polypeptide, and the second mRNA transcript comprises a nucleotide sequence encoding another heterologous non-arenaviral polypeptide; and the two heterologous non-arenaviral polypeptides are the same or different from each other; and the first mRNA transcript is under control of 3′ UTR and the second mRNA transcript is under control of 5′ UTR. In certain embodiments, the first mRNA transcript comprises a nucleotide sequence encoding arenavirus GP signal peptide fused to a heterologous non-arenaviral polypeptide, and there is no second mRNA transcript; and the first mRNA transcript is under control of 3′ UTR. In certain embodiments, the arenavirus genomic or antigenomic segment provided herein is one of the S1 segments depicted in FIG. 4E.

[0447] In certain embodiments, the first mRNA transcript comprises a nucleotide sequence encoding a heterologous non-arenaviral signal peptide, arenavirus GP1, and arenavirus GP2, and the second mRNA transcript comprises a nucleotide sequence encoding a heterologous non-arenaviral polypeptide; and the first mRNA transcript is under control of 3′ UTR and the second mRNA transcript is under control of 5′ UTR. In certain embodiments, the first mRNA transcript comprises a nucleotide sequence encoding a heterologous non-arenaviral signal peptide, arenavirus GP, and arenavirus GP2, and there is no second mRNA transcript; and the first mRNA transcript is under control of 3′ UTR. In certain embodiments, the arenavirus genomic or antigenomic segment provided herein is one of the S1 segments depicted in FIG. 4F.

[0448] Non-limiting examples of the polypeptides encoded by the first and second mRNA transcripts are illustrated in Table 3.PG-4T.

TABLE 3
Non-limiting examples of the polypeptides encoded by the first and second
mRNA transcripts.

| | 1^{st} mRNA transcript | | |
|---|---|---|---|
| | Functional fragment | | Functional |
| | of a first polypeptide | | fragment of a first |
| | and a heterologous | | polypeptide and a |
| | non-arenaviral | | third polypeptide |
| | polypeptide (fused | Functional | (fused together or |
| | together or separated | fragment of a first | separated by an |
| 2^{nd} mRNA transcript | by an IRES) | polypeptide | IRES) |
| Functional fragment | Exemplary | Exemplary | Exemplary |
| of a first polypeptide | combination | combination | combination |
| and a heterologous | | | |
| non-arenaviral | | | |
| polypeptide | | | |
| (fused together or | | | |
| separated by an | | | |
| IRES) | | | |
| Functional fragment | Exemplary | Exemplary | Exemplary |
| of a first polypeptide | combination | combination | combination |
| Functional fragment | Exemplary | Exemplary | Exemplary |
| of a first polypeptide | combination | combination | combination |
| and a third | | | |
| polypeptide | | | |
| (fused together or | | | |
| separated by an | | | |
| IRES) | | | |
| A heterologous non- | Exemplary | Exemplary | Exemplary |
| arenaviral | combination | combination | combination |
| polypeptide | | | |
| A second | Exemplary | Exemplary | Exemplary |
| polypeptide | combination | combination | combination |
| Functional fragment | Exemplary | Exemplary | Exemplary |
| of a second | combination | combination | combination |
| polypeptide and a | | | |
| heterologous non- | | | |
| arenaviral | | | |
| polypeptide | | | |
| (fused together or | | | |
| separated by an | | | |
| IRES) | | | |
| Functional fragment | Exemplary | Exemplary | Exemplary |
| of a second | combination | combination | combination |
| polypeptide | | | |
| Functional fragment | Exemplary | Exemplary | Exemplary |
| of a second | combination | combination | combination |
| polypeptide and a | | | |
| third polypeptide | | | |
| (fused together or | | | |
| separated by an | | | |
| IRES) | | | |

[0449] In certain embodiments, the functional fragment is selected from the group consisting of arenavirus GP signal peptide, arenavirus GP1 and arenavirus GP2. In certain embodiments, non-limiting examples of the polypeptides encoded by the first and second mRNA transcripts related to functional fragments of GP are illustrated in Table 4.

TABLE 4
Non-limiting examples of the polypeptides encoded by the first and second
mRNA transcripts related to functional fragments of GP.

| First mRNA transcript | Second mRNA transcript |
|---|---|
| GP signal peptide and a heterologous non- | A heterologous non-arenaviral |
| arenaviral polypeptide | signal peptide, arenavirus GP1, |
| | and arenavirus GP2 |
| GP signal peptide and a heterologous non- | A heterologous non-arenaviral |
| arenaviral polypeptide | polypeptide |
| GP signal peptide and a heterologous non- | NP |
| arenaviral polypeptide | |
| GP signal peptide and a heterologous non- | Z |
| arenaviral polypeptide | |
| GP signal peptide and a heterologous non- | L |
| arenaviral polypeptide | |
| GP signal peptide and a heterologous non- | No second mRNA transcript |
| arenaviral polypeptide | |
| GP signal peptide | A heterologous non-arenaviral |
| | signal peptide, arenavirus GP1, |
| | and arenavirus GP2 |
| GP signal peptide | A heterologous non-arenaviral |
| | polypeptide |
| GP signal peptide | NP |
| GP signal peptide | Z |
| GP signal peptide | L |
| GP signal peptide | No second mRNA transcript |
| GP signal peptide and NP | A heterologous non-arenaviral |
| | signal peptide, arenavirus GP1, |
| | and arenavirus GP2 |
| GP signal peptide and NP | A heterologous non-arenaviral |
| | polypeptide |
| GP signal peptide and NP | Z |
| GP signal peptide and NP | L |
| GP signal peptide and NP | No second mRNA transcript |
| GP signal peptide and Z | A heterologous non-arenaviral |
| | signal peptide, arenavirus GP1, |
| | and arenavirus GP2 |
| GP signal peptide and Z | A heterologous non-arenaviral |
| | polypeptide |
| GP signal peptide and Z | NP |
| GP signal peptide and Z | L |
| GP signal peptide and Z | No second mRNA transcript |
| GP signal peptide and L | A heterologous non-arenaviral |
| | signal peptide, arenavirus GP1, |
| | and arenavirus GP2 |
| GP signal peptide and L | A heterologous non-arenaviral |
| | polypeptide |
| GP signal peptide and L | NP |
| GP signal peptide and L | Z |
| GP signal peptide and L | No second mRNA transcript |
| GP1, GP2 and a heterologous non- | GP signal peptide and |
| arenaviral signal peptide | a heterologous non- |
| | arenaviral polypeptide |
| GP1, GP2 and a heterologous non- | GP signal peptide |
| arenaviral signal peptide | |
| GP1, GP2 and a heterologous non- | A heterologous non-arenaviral |
| arenaviral signal peptide | polypeptide |
| GP1, GP2 and a heterologous non- | NP |
| arenaviral signal peptide | |
| GP1, GP2 and a heterologous non- | Z |
| arenaviral signal peptide | |
| GP1, GP2 and a heterologous non- | L |
| arenaviral signal peptide | |
| GP1, GP2 and a heterologous non- | No second mRNA transcript |
| arenaviral signal peptide | |

### 5.6.1 Arenavirus Particle Comprising the Arenavirus Genomic or Antigenomic Segment Provided Herein

[0450] In certain embodiments, provided herein is an arenavirus particle comprising the arenavirus genomic or antigenomic segment provided herein.

[0451] In certain embodiments, the genome of the arenavirus particle consists of an S segment and an L segment.

[0452] In certain embodiments, the arenavirus particle is tri-segmented. In certain embodiments, the tri-segmented arenavirus particle comprises two S segments and an L segment. In certain embodiments, the tri-segmented arenavirus particle comprises an S segment and two L segments.

[0453] In certain embodiments, the genome of the arenavirus particle consists of
[0454] a) an S segment that encodes arenavirus GP signal peptide and a heterologous non-arenaviral polypeptide or arenavirus GP signal peptide alone under the control of an arenavirus 3′ UTR and a heterologous non-arenaviral signal peptide, arenavirus GP1 and arenavirus GP2 under the control of an arenavirus 5′ UTR;
[0455] b) an S segment that encodes NP under the control of an arenavirus 3′ UTR and another heterologous non-arenaviral polypeptide or no polypeptide under the control of an arenavirus 5′ UTR; and
[0456] c) an L segment that encodes L protein under the control of an arenavirus 3′ UTR and Z protein under the control of an arenavirus 5′ UTR; and wherein the two heterologous non-arenaviral polypeptides are the same or different from each other.

[0457] In certain embodiments, the genome of the arenavirus particle consists of
[0458] a) an S segment that encodes arenavirus GP signal peptide and a heterologous non-arenaviral polypeptide or arenavirus GP signal peptide alone under the control of an arenavirus 3′ UTR and another heterologous non-arenaviral polypeptide or no polypeptide under the control of an arenavirus 5′ UTR;
[0459] b) an S segment that encodes NP under the control of an arenavirus 3′ UTR and a heterologous non-arenaviral signal peptide, arenavirus GP1 and arenavirus GP2 under the control of an arenavirus 5′ UTR; and
[0460] c) an L segment that encodes L protein under the control of an arenavirus 3′ UTR and Z protein under the control of an arenavirus 5′ UTR; and
   wherein the two heterologous non-arenaviral polypeptides are the same or different from each other.

[0461] In certain embodiments, the arenavirus particle is derived from a Lassa virus. In certain embodiments, the arenavirus particle is derived from a Lymphocytic choriomeningitis virus (LCMV). In certain embodiments, the LCMV is a MP strain, a WE strain, an Armstrong strain, or an Armstrong Clone 13 strain. In certain embodiments, the arenavirus particle is derived from a Pichinde virus (PICV). In certain embodiments, the arenavirus particle is derived from a Junin virus vaccine Candid #1, or a Junin virus vaccine XJ Clone 3 strain. In certain embodiments, the arenavirus particle is derived from an Oliveros virus. In certain embodiments, the arenavirus particle is derived from a Tamiami virus. In certain embodiments, the arenavirus particle is derived from a Mobala virus. In certain embodiments, the arenavirus particle is derived from a Mopeia virus. In certain embodiments, the arenavirus particle is derived from an Ippy virus. In certain embodiments, the arenavirus particle is derived from an Amapari virus. In certain embodiments, the arenavirus particle is derived from a Flexal virus. In certain embodiments, the arenavirus particle is derived from a Guanarito virus. In certain embodiments, the arenavirus particle is derived from a Latino virus. In certain embodiments, the arenavirus particle is derived from a Machupo virus. In certain embodiments, the arenavirus particle is derived from a Parana virus. In certain embodiments, the arenavirus particle is derived from a Pirital virus. In certain embodiments, the arenavirus particle is derived from a Sabia virus. In certain embodiments, the arenavirus particle is derived from a Tacaribe virus. In certain embodiments, the arenavirus particle is derived from a Bear Canyon virus. In certain embodiments, the arenavirus particle is derived from a Whitewater Arroyo virus. In certain embodiments, the arenavirus particle is derived from an Allpahuayo virus (ALLV). In certain embodiments, the arenavirus particle is derived from an Alxa virus. In certain embodiments, the arenavirus particle is derived from a Chapare virus. In certain embodiments, the arenavirus particle is derived from a Lijiang virus. In certain embodiments, the arenavirus particle is derived from a Cupixi virus. In certain embodiments, the arenavirus particle is derived from a Gairo virus. In certain embodiments, the arenavirus particle is derived from a Loei River virus. In certain embodiments, the arenavirus particle is derived from a Lujo virus. In certain embodiments, the arenavirus particle is derived from a Luna virus. In certain embodiments, the arenavirus particle is derived from a Luli virus. In certain embodiments, the arenavirus particle is derived from a Lunk virus. In certain embodiments, the arenavirus particle is derived from a Mariental virus. In certain embodiments, the arenavirus particle is derived from a Merino Walk virus. In certain embodiments, the arenavirus particle is derived from a Morogoro virus. In certain embodiments, the arenavirus particle is derived from an Okahandja virus. In certain embodiments, the arenavirus particle is derived from an Aporé virus. In certain embodiments, the arenavirus particle is derived from a Ryukyu virus. In certain embodiments, the arenavirus particle is derived from a Solwezi virus. In certain embodiments, the arenavirus particle is derived from a souris virus. In certain embodiments, the arenavirus particle is derived from a Wenzhou virus. In certain embodiments, the arenavirus particle is derived from a Big Brushy Tank virus. In certain embodiments, the arenavirus particle is derived from a Catarina virus. In certain embodiments, the arenavirus particle is derived from a Skinner Tank virus. In certain embodiments, the arenavirus particle is derived from a Tonto Creek virus. In certain embodiments, the arenavirus particle is derived from a Xapuri virus.

[0462] In certain embodiments, the genome of the arenavirus particle encodes the heterologous non-arenaviral polypeptide and/or the second heterologous non-arenaviral polypeptide, and the growth or infectivity of the arenavirus particle is not inferior to a second arenavirus particle, wherein the genome of the second arenavirus particle encodes the same heterologous non-arenaviral polypeptide and/or the same second heterologous non-arenaviral polypeptide; and wherein all arenaviral GP, NP, Z and L in the second arenavirus particle are each expressed as one ORF.

[0463] In certain embodiments, the arenavirus particle is infectious and replication competent. In certain embodiments, the arenavirus particle is attenuated as compared to its parental wild-type virus. In certain embodiments, the arenavirus particle is infectious but unable to produce further infectious progeny in non-complementing cells.

[0464] In certain embodiments, the titer of the arenavirus particle is at least about 1%, 2%, 3%, 4%, 5%, 6%, 7%, 8%, 9%, 10%, 15%, 20%, 30%, 40%, 50%, 60%, 70%, 80%, 90%, 100%, 1.5-fold, 2-fold, 3-fold, 4-fold, 5-fold, 6-fold, 7-fold, 8-fold, 9-fold, 10-fold, 12-fold, 15-fold, 18-fold, 20-fold, 25-fold, or 30-fold lower during a persistent infection in AGRAG mice than the titer of the respective wild-type parental arenavirus particle.

[0465] In certain embodiments, the arenavirus particle expresses a heterologous non-arenaviral polypeptide under control of an arenavirus 3′ UTR; wherein the arenavirus particle induces at least about 1%, 2%, 3%, 4%, 5%, 6%, 7%, 8%, 9%, 10%, 15%, 20%, 30%, 40%, 50%, 60%, 70%, 80%, 90%, 100%, 1.5-fold, 2-fold, 3-fold, 4-fold, 5-fold, 6-fold, 7-fold, 8-fold, 9-fold, 10-fold, 12-fold, 15-fold, 18-fold, 20-fold, 25-fold, or 30-fold higher immune responses against the heterologous non-arenaviral polypeptide than another arenavirus particle expressing the same heterologous non-arenaviral polypeptide under control of an arenavirus 5′ UTR. In some embodiments, an immune response (e.g., a higher immune response) is obtained after an arenavirus particle of the present disclosure (e.g., arenavirus particle expressing a heterologous non-arenaviral polypeptide under control of an arenavirus 3′ UTR) is administered to a subject. In some embodiments, an immune response is obtained after an arenavirus particle expressing the heterologous non-arenaviral polypeptide under control of an arenavirus 5′ UTR is administered to a subject or to a comparable subject. In some embodiments, an immune response obtained after an arenavirus particle of the present disclosure is administered to a subject is compared to an immune response obtained after another arenavirus particle (e.g., arenavirus particle expressing the heterologous non-arenaviral polypeptide under control of an arenavirus 5′ UTR) is administered to a subject or to a comparable subject. In some embodiments, the subject and/or the comparable subject is a subject in need of treatment. In some embodiments, the subject and/or the comparable subject is a subject with a disease and/or with symptoms of a disease. In some embodiments, the comparable subject is a healthy subject. In some embodiments, the comparable subject is a subject without the disease. In some embodiments, the comparable subject is a subject not in need of treatment.

[0466] In certain embodiments, at least about, or about, 5%, 10%, 15%, 20%, 25%, 30%, 35%, 40%, 45%, 50%, 55%, 60%, 65%, 70%, 75%, 80%, 85%, 90%, 95%, 99%, or 100% of cells express the two heterologous non-arenaviral polypeptides after an arenavirus particle of the present disclosure (e.g., expressing one heterologous non-arenaviral polypeptide under control of an arenavirus 3′ UTR) is introduced to (or infects) the cells (e.g., to a population of cells). In certain embodiments, the proportion of cells that express the heterologous non-arenaviral polypeptides after an arenavirus particle of the present disclosure (e.g., expressing one heterologous non-arenaviral polypeptide under control of an arenavirus 3′ UTR in one S segment) is introduced to (or infects) a population of cells is higher as compared to the proportion of cells that express the heterologous non-arenaviral polypeptides after an arenavirus particle expressing the same heterologous non-arenaviral polypeptides under control of arenavirus 5′ UTR is introduced to (or infects) a population of cells. In certain embodiments, at least about 1%, 2%, 3%, 4%, 5%, 6%, 7%, 8%, 9%, 10%, 15%, 20%, 25%, 30%, 35%, 40%, 45%, 50%, 55%, 60%, 65%, 70%, 75%, 80%, 85%, 90%, 95%, 99%, or 100% more cells express the heterologous non-arenaviral polypeptides after an arenavirus particle of the present disclosure (e.g., expressing one heterologous non-arenaviral polypeptide under control of an arenavirus 3′ UTR in one S segment) is introduced to (or infects) a population of cells as compared to the proportion of cells that express the heterologous non-arenaviral polypeptides after an arenavirus particle expressing the same heterologous non-arenaviral polypeptides under control of arenavirus 5′ UTR is introduced to (or infects) a comparable population of cells.

[0467] In certain embodiments, at least about, or about, 5%, 10%, 15%, 20%, 25%, 30%, 35%, 40%, 45%, 50%, 55%, 60%, 65%, 70%, 75%, 80%, 85%, 90%, 95%, 99%, or 100% of cells express (e.g., co-express) the two heterologous non-arenaviral polypeptides after an arenavirus particle of the present disclosure (e.g., expressing one heterologous non-arenaviral polypeptide under control of an arenavirus 3′ UTR in one S segment and expressing another heterologous non-arenaviral polypeptide under control of an arenavirus 5′ UTR in another S segment) is introduced to (or infects) the cells (e.g., to a population of cells). In certain embodiments, the proportion of cells that express (e.g., co-express) the two heterologous non-arenaviral polypeptides after an arenavirus particle of the present disclosure (e.g., expressing one heterologous non-arenaviral polypeptide under control of an arenavirus 3′ UTR in one S segment and expressing another heterologous non-arenaviral polypeptide under control of an arenavirus 5′ UTR in another S segment) is introduced to (or infects) a population of cells is higher as compared to the proportion of cells that express (e.g., co-express) the two heterologous non-arenaviral polypeptides after an arenavirus particle expressing the same two heterologous non-arenaviral polypeptides under control of arenavirus 5′ UTRs (e.g., expressing one heterologous non-arenaviral polypeptide under control of an arenavirus 5′ UTR of one S segment and expressing the other heterologous non-arenaviral polypeptide under control of an arenavirus 5′ UTR of the other S segment) is introduced to (or infects) a population of cells. In certain embodiments, at least about 1%, 2%, 3%, 4%, 5%, 6%, 7%, 8%, 9%, 10%, 15%, 20%, 25%, 30%, 35%, 40%, 45%, 50%, 55%, 60%, 65%, 70%, 75%, 80%, 85%, 90%, 95%, 99%, or 100% more cells express (e.g., co-express) the two heterologous non-arenaviral polypeptides after an arenavirus particle of the present disclosure (e.g., expressing one heterologous non-arenaviral polypeptide under control of an arenavirus 3′ UTR in one S segment and expressing another heterologous non-arenaviral polypeptide under control of an arenavirus 5′ UTR in another S segment) is introduced to (or infects) a population of cells as compared to the proportion of cells that express (e.g., co-express) the two heterologous non-arenaviral polypeptides after an arenavirus particle expressing the same two heterologous non-arenaviral polypeptides under control of arenavirus 5′ UTRs (e.g., expressing one heterologous non-arenaviral polypeptide under control of an arenavirus 5′ UTR of one S segment and expressing the other heterologous non-arenaviral polypeptide under control of an arenavirus 5′ UTR of the other S segment) is introduced to (or infects) a comparable population of cells.

### 5.6.2 Compositions and Methods Related to the Nucleotide Sequence Provided Herein

[0468] In certain embodiments, provided herein is a translation product of the arenavirus genomic or antigenomic segment provided herein.

[0469] In certain embodiments, provided herein is a cDNA of the arenavirus genomic or antigenomic segment provided herein.

[0470] In certain embodiments, provided herein is a method of producing an arenavirus genomic or antigenomic segment, wherein the method comprises transcribing the cDNA provided herein.

[0471] In certain embodiments, provided herein is a method of generating an arenavirus particle, wherein the method comprises:
[0472] a) transfecting into a host cell one or more cDNA sequences of the arenavirus genomic or antigenomic segment provided herein or one or more RNA sequences each transcribed in vitro from the cDNA sequence of the arenavirus genomic or antigenomic segment provided herein;
[0473] b) transfecting into the host cell nucleotide sequences encoding arenavirus trans-acting factors;
[0474] c) maintaining the host cell under conditions suitable for virus formation; and
[0475] d) harvesting the arenavirus particle.

[0476] In certain embodiments, the one or more cDNA sequences are transcribed using a bidirectional promoter. In certain embodiments, the one or more cDNA sequences are transcribed under the control of a promoter selected from the group consisting of:
[0477] a) a RNA polymerase I promoter;
[0478] b) a RNA polymerase II promoter; and
[0479] c) a T7 promoter.

[0480] In certain embodiments, provided herein is a DNA expression vector comprising a DNA sequence encoding the arenavirus genomic or antigenomic segment provided herein.

[0481] In certain embodiments, provided herein is a method of rescuing an arenavirus particle using the arenavirus genomic or antigenomic segment provided herein or a DNA sequence encoding the arenavirus genomic or antigenomic segment.

[0482] In certain embodiments, provided herein is a host cell comprising the arenavirus genomic or antigenomic segment provided herein, the translation product provided herein, the arenavirus particle provided herein, or the DNA expression vector provided herein.

[0483] In certain embodiments, provided herein is a vaccine comprising the arenavirus genomic or antigenomic segment provided herein, the translation product provided herein, the arenavirus particle provided herein, or the DNA expression vector provided herein, and a pharmaceutically acceptable carrier.

[0484] In certain embodiments, provided herein is a pharmaceutical composition comprising the arenavirus genomic or antigenomic segment provided herein, the translation product provided herein, the arenavirus particle provided herein, or the DNA expression vector provided herein, and a pharmaceutically acceptable carrier.

### 5.7 Translation Product Provided Herein

[0485] In certain embodiments, provided herein is a translation product of the nucleotide sequence provided herein (see Section 5.4). In certain embodiments, provided herein is a translation product of the mRNA transcript of the genome of the arenavirus particle provided herein (see Section 5.5). In certain embodiments, provided herein is a translation product of the arenavirus genomic or antigenomic segment provided herein (see Section 5.6).

[0486] In certain embodiments, the translation product is a chimeric protein. In certain embodiments, the translation product comprises a functional fragment (see Section 5.2) of a polypeptide provided herein (see Section 5.1) fused to a heterologous non-arenaviral polypeptide (see Section 5.3). In certain embodiments, the translation product comprises a functional fragment (see Section 5.2) of a polypeptide provided herein (see Section 5.1) fused to another polypeptide provided herein (see Section 5.1). In certain embodiments, the translation product comprises a functional fragment (see Section 5.2) of a polypeptide provided herein (see Section 5.1) fused to another functional fragment of the same polypeptide or another polypeptide provided herein (see Section 5.1). In certain embodiments, the translation product comprises a functional fragment (see Section 5.2) of a polypeptide provided herein (see Section 5.1). In certain embodiments, the translation product comprises a heterologous non-arenaviral polypeptide (see Section 5.3). In certain embodiments, the translation product comprises a polypeptide provided herein (see Section 5.1).

[0487] In certain embodiments, the translation product provided herein is a translation product of any one of the first or the second ORFs listed in Table 1. In certain embodiments, the translation product provided herein is a translation product of any one of the first or the second ORFs listed in Table 2. In certain embodiments, the translation product provided herein is a translation product of any one of the first or the second mRNA transcripts listed in Table 3. In certain embodiments, the translation product provided herein is a translation product of any one of the first or the second mRNA transcripts listed in Table 4.

[0488] In certain embodiments, the translation product provided herein is a translation product of any one of the arenavirus genomic or antigenomic segments depicted in any one of FIGS. 4A-4F.

### 5.8 Vector Systems and Cell Lines

[0489] In certain embodiments, provided herein are DNAs comprising or consisting of the nucleotide sequence as described in Section 5.4. In certain embodiments, provided herein is an arenavirus genomic or antigenomic segment as described in Section 5.6. In certain embodiments, provided herein is an arenavirus genomic or antigenomic segment in the arenavirus particle as described in Section 5.5. In certain embodiments, provided herein is a DNA sequence encoding the mRNA transcript in the arenavirus particle as described in Section 5.5. In certain embodiments, the DNA is a cDNA.

[0490] In one embodiment, provided herein is a DNA expression vector comprising the nucleotide sequence as described in Section 5.4. In one embodiment, provided herein is a DNA expression vector comprising a cDNA encoding an arenavirus genomic or antigenomic segment as described in Section 5.6. In one embodiment, provided herein is a DNA expression vector comprising a cDNA encoding the arenavirus genomic or antigenomic segment in the arenavirus particle as described in Section 5.5. In certain embodiments, provided herein is a DNA expression vector comprising a cDNA of the mRNA transcript in the arenavirus particle as described in Section 5.5.

[0491] In one embodiment, provided herein is a DNA expression vector system that encodes the bi-segmented or tri-segmented arenavirus particle as described herein. Specifically, provided herein is a DNA expression vector system wherein one or more vectors encode two or three arenavirus genomic or antigenomic segments, namely, one L segment and one S section of a bi-segmented arenavirus as described herein, or one L segment and two S segments or two L segments and one S segment of a tri-segmented arenavirus particle described herein. Such a vector system can encode one or more separate DNA molecules.

[0492] In another embodiment, provided herein is a DNA or cDNA of the arenavirus S segment(s) as described in Section 5.6, and is part of or incorporated into a DNA expression system. In other embodiments, a DNA or cDNA of the arenavirus L segment(s) as described in Section 5.6 is part of or incorporated into a DNA expression system.

[0493] In certain embodiments, the DNA provided herein can be derived from a particular strain of LCMV. Strains of LCMV include Clone 13, MP strain, Arm CA 1371, Arm E-250, WE, UBC, Traub, Pasteur, 810885, CH-5692, Marseille #12, HP65-2009, 200501927, 810362, 811316, 810316, 810366, 20112714, Douglas, GR01, SN05, CABN and their derivatives. In specific embodiments, the cDNA is derived from LCMV Clone 13. In other specific embodiments, the cDNA is derived from LCMV MP strain.

[0494] In certain embodiments, the DNA or cDNA provided herein can be derived from a particular strain of Lassa virus. In certain embodiments, the DNA or cDNA provided herein can be derived from a particular strain of Pichinde virus. In certain embodiments, the DNA or cDNA provided herein can be derived from a particular strain of Junin virus. In certain embodiments, the DNA or cDNA provided herein can be derived from a particular strain of Oliveros virus. In certain embodiments, the DNA or cDNA provided herein can be derived from a particular strain of Tamiami virus. In certain embodiments, the DNA or cDNA provided herein can be derived from a particular strain of Mobala virus. In certain embodiments, the DNA or cDNA provided herein can be derived from a particular strain of Mopeia virus. In certain embodiments, the DNA or cDNA provided herein can be derived from a particular strain of Ippy virus. In certain embodiments, the DNA or cDNA provided herein can be derived from a particular strain of Amapari virus. In certain embodiments, the DNA or cDNA provided herein can be derived from a particular strain of Flexal virus. In certain embodiments, the DNA or cDNA provided herein can be derived from a particular strain of Guanarito virus. In certain embodiments, the DNA or cDNA provided herein can be derived from a particular strain of Latino virus. In certain embodiments, the cDNA provided herein can be derived from a particular strain of Machupo virus. In certain embodiments, the DNA or cDNA provided herein can be derived from a particular strain of Parana virus. In certain embodiments, the DNA or cDNA provided herein can be derived from a particular strain of Pirital virus. In certain embodiments, the DNA or cDNA provided herein can be derived from a particular strain of Sabia virus. In certain embodiments, the DNA or cDNA provided herein can be derived from a particular strain of Tacaribe virus. In certain embodiments, the DNA or cDNA provided herein can be derived from a particular strain of Bear Canyon virus. In certain embodiments, the DNA or cDNA provided herein can be derived from a particular strain of Whitewater Arroyo virus. In certain embodiments, the DNA or cDNA provided herein can be derived from a particular strain of Allpahuayo virus (ALLV). In certain embodiments, the DNA or cDNA provided herein can be derived from a particular strain of Alxa virus. In certain embodiments, the DNA or cDNA provided herein can be derived from a particular strain of Chapare virus. In certain embodiments, the DNA or cDNA provided herein can be derived from a particular strain of Lijiang virus. In certain embodiments, the DNA or cDNA provided herein can be derived from a particular strain of Cupixi virus. In certain embodiments, the DNA or cDNA provided herein can be derived from a particular strain of Gairo virus. In certain embodiments, the DNA or cDNA provided herein can be derived from a particular strain of Loei River virus. In certain embodiments, the DNA or cDNA provided herein can be derived from a particular strain of Lujo virus. In certain embodiments, the DNA or cDNA provided herein can be derived from a particular strain of Luna virus. In certain embodiments, the DNA or cDNA provided herein can be derived from a particular strain of Luli virus. In certain embodiments, the DNA or cDNA provided herein can be derived from a particular strain of Lunk virus. In certain embodiments, the DNA or cDNA provided herein can be derived from a particular strain of Mariental virus. In certain embodiments, the DNA or cDNA provided herein can be derived from a particular strain of Merino Walk virus. In certain embodiments, the DNA or cDNA provided herein can be derived from a particular strain of Morogoro virus. In certain embodiments, the DNA or cDNA provided herein can be derived from a particular strain of Okahandja virus. In certain embodiments, the DNA or cDNA provided herein can be derived from a particular strain of Aporé virus. In certain embodiments, the DNA or cDNA provided herein can be derived from a particular strain of Ryukyu virus. In certain embodiments, the DNA or cDNA provided herein can be derived from a particular strain of Solwezi virus. In certain embodiments, the DNA or cDNA provided herein can be derived from a particular strain of souris virus. In certain embodiments, the DNA or cDNA provided herein can be derived from a particular strain of Wenzhou virus. In certain embodiments, the DNA or cDNA provided herein can be derived from a particular strain of Big Brushy Tank virus. In certain embodiments, the DNA or cDNA provided herein can be derived from a particular strain of Catarina virus. In certain embodiments, the DNA or cDNA provided herein can be derived from a particular strain of Skinner Tank virus. In certain embodiments, the DNA or cDNA provided herein can be derived from a particular strain of Tonto Creek virus. In certain embodiments, the DNA or cDNA provided herein can be derived from a particular strain of Xapuri virus.

[0495] In certain embodiments, the vector generated to encode an arenavirus particle as described herein may be based on a specific strain of LCMV. Strains of LCMV include Clone 13, MP strain, Arm CA 1371, Arm E-250, WE, UBC, Traub, Pasteur, 810885, CH-5692, Marseille #12, HP65-2009, 200501927, 810362, 811316, 810316, 810366, 20112714, Douglas, GR01, SN05, CABN and their derivatives. In certain embodiments, an arenavirus particle or a tri-segmented arenavirus particle as described herein may be based on LCMV Clone 13. In other embodiments, the vector generated to encode an arenavirus particle or a tri-segmented arenavirus particle as described herein may be based on LCMV MP strain.

[0496] In certain embodiments, the vector generated to encode an arenavirus particle as described herein may be based on a specific strain of Lassa virus. In certain embodiments, the vector generated to encode an arenavirus particle as described herein may be based on a specific strain of Pichinde virus. In certain embodiments, the vector generated to encode an arenavirus particle as described herein may be based on a specific strain of Junin virus. In certain embodiments, the vector generated to encode an arenavirus particle as described herein may be based on a specific strain of Oliveros virus. In certain embodiments, the vector generated to encode an arenavirus particle as described herein may be based on a specific strain of Tamiami virus. In certain embodiments, the vector generated to encode an arenavirus particle as described herein may be based on a specific strain of Mobala virus. In certain embodiments, the vector generated to encode an arenavirus particle as described herein may be based on a specific strain of Mopeia virus. In certain embodiments, the vector generated to encode an arenavirus particle as described herein may be based on a specific strain of Ippy virus. In certain embodiments, the vector generated to encode an arenavirus particle as described herein may be based on a specific strain of Amapari virus. In certain embodiments, the vector generated to encode an arenavirus particle as described herein may be based on a specific strain of Flexal virus. In certain embodiments, the vector generated to encode an arenavirus particle as described herein may be based on a specific strain of Guanarito virus. In certain embodiments, the vector generated to encode an arenavirus particle as described herein may be based on a specific strain of Latino virus. In certain embodiments, the vector generated to encode an arenavirus particle as described herein may be based on a specific strain of Machupo virus. In certain embodiments, the vector generated to encode an arenavirus particle as described herein may be based on a specific strain of Parana virus. In certain embodiments, the vector generated to encode an arenavirus particle as described herein may be based on a specific strain of Pirital virus. In certain embodiments, the vector generated to encode an arenavirus particle as described herein may be based on a specific strain of Sabia virus. In certain embodiments, the vector generated to encode an arenavirus particle as described herein may be based on a specific strain of Tacaribe virus. In certain embodiments, the vector generated to encode an arenavirus particle as described herein may be based on a specific strain of Bear Canyon virus. In certain embodiments, the vector generated to encode an arenavirus particle as described herein may be based on a specific strain of Whitewater Arroyo virus. In certain embodiments, the vector generated to encode an arenavirus particle as described herein may be based on a specific strain of Allpahuayo virus (ALLV). In certain embodiments, the vector generated to encode an arenavirus particle as described herein may be based on a specific strain of Alxa virus. In certain embodiments, the vector generated to encode an arenavirus particle as described herein may be based on a specific strain of Chapare virus. In certain embodiments, the vector generated to encode an arenavirus particle as described herein may be based on a specific strain of Lijiang virus. In certain embodiments, the vector generated to encode an arenavirus particle as described herein may be based on a specific strain of Cupixi virus. In certain embodiments, the vector generated to encode an arenavirus particle as described herein may be based on a specific strain of Gairo virus. In certain embodiments, the vector generated to encode an arenavirus particle as described herein may be based on a specific strain of Loei River virus. In certain embodiments, the vector generated to encode an arenavirus particle as described herein may be based on a specific strain of Lujo virus. In certain embodiments, the vector generated to encode an arenavirus particle as described herein may be based on a specific strain of Luna virus. In certain embodiments, the vector generated to encode an arenavirus particle as described herein may be based on a specific strain of Luli virus. In certain embodiments, the vector generated to encode an arenavirus particle as described herein may be based on a specific strain of Lunk virus. In certain embodiments, the vector generated to encode an arenavirus particle as described herein may be based on a specific strain of Mariental virus. In certain embodiments, the vector generated to encode an arenavirus particle as described herein may be based on a specific strain of Merino Walk virus. In certain embodiments, the vector generated to encode an arenavirus particle as described herein may be based on a specific strain of Morogoro virus. In certain embodiments, the vector generated to encode an arenavirus particle as described herein may be based on a specific strain of Okahandja virus. In certain embodiments, the vector generated to encode an arenavirus particle as described herein may be based on a specific strain of Aporé virus. In certain embodiments, the vector generated to encode an arenavirus particle as described herein may be based on a specific strain of Ryukyu virus. In certain embodiments, the vector generated to encode an arenavirus particle as described herein may be based on a specific strain of Solwezi virus. In certain embodiments, the vector generated to encode an arenavirus particle as described herein may be based on a specific strain of souris virus. In certain embodiments, the vector generated to encode an arenavirus particle as described herein may be based on a specific strain of Wenzhou virus. In certain embodiments, the vector generated to encode an arenavirus particle as described herein may be based on a specific strain of Big Brushy Tank virus. In certain embodiments, the vector generated to encode an arenavirus particle as described herein may be based on a specific strain of Catarina virus. In certain embodiments, the vector generated to encode an arenavirus particle as described herein may be based on a specific strain of Skinner Tank virus. In certain embodiments, the vector generated to encode an arenavirus particle as described herein may be based on a specific strain of Tonto Creek virus. In certain embodiments, the vector generated to encode an arenavirus particle as described herein may be based on a specific strain of Xapuri virus,

[0497] In another embodiment, provided herein is a cell, wherein the cell comprises a DNA or a vector system described above in this section. Cell lines derived from such cells, cultures comprising such cells, methods of culturing such cells are also provided herein. In certain embodiments, provided herein is a cell, wherein the cell comprises a cDNA of the tri-segmented arenavirus particle. In some embodiments, the cell comprises the S segment(s) and/or the L segment(s).

### 5.9 Generation of the Arenavirus Particles

[0498] Generally, arenavirus particles can be recombinantly produced by standard reverse genetic techniques as described for LCMV (see Flatz et al., 2006, Proc Natl Acad Sci USA 103:4663-4668; Sanchez et al., 2006, Virology 350:370; Ortiz-Riano et al., 2013, J Gen Virol. 94:1175-88, which are incorporated by reference herein). To generate the arenavirus particles provided herein, these techniques can be applied as described below.

[0499] In certain embodiments, the genome of the viruses may comprise the nucleotide sequence described in Section 5.4. The genome of the viruses can be modified as described in Section 5.6. The generation of an arenavirus particle as described in Section 5.5 or an arenavirus particle comprising a genomic or antigenomic segment as described in Section 5.6 can be recombinantly produced by any reverse genetic techniques known to one skilled in the art.

[0500] In certain embodiments, an arenavirus particle as described in Section 5.5 or an arenavirus particle comprising a genomic or antigenomic segment as described in Section 5.6 can be tri-segmented. A tri-segmented arenavirus particle can be recombinantly produced by reverse genetic techniques known in the art, for example as described in International Publication No.: WO 2016/075250 A1.

### 5.9.1 Infectious and Replication Competent Arenavirus Particle

[0501] In certain embodiments, the method of generating a bi-segmented arenavirus particle comprises (i) transfecting into a host cell the cDNA or RNA sequences each transcribed in vitro from DNA sequences of a first and a second arenavirus genomic or antigenomic segments; (ii) transfecting into the host cell nucleotide sequences driving intracellular expression of arenaviral trans-acting factors; (iii) maintaining the host cell under conditions suitable for virus formation; and (iv) harvesting the arenavirus particle. In certain more specific embodiments, the cDNA is comprised in a plasmid.

[0502] In certain embodiments, when the arenavirus particle is tri-segmented, the method of generating the arenavirus particle comprises (i) transfecting into a host cell the cDNAs or RNA sequences each transcribed in vitro from DNA sequences of the one L segment and two S segments or two L segments and one S segment; (ii) transfecting into the host cell nucleotide sequences driving intracellular expression of arenaviral trans-acting factors; (iii) maintaining the host cell under conditions suitable for virus formation; and (iv) harvesting the arenavirus particle.

[0503] Once generated from cDNA, arenavirus particles (i.e., infectious and replication competent) can be propagated. In certain embodiments, the arenavirus particle can be propagated in any host cell that allows the virus to grow to titers that permit the uses of the virus as described herein. In one embodiment, the host cell allows the arenavirus particle to grow to titers comparable to those determined for the corresponding tri-segmented artLCMV particle expressing the same heterologous non-arenaviral polypeptide(s).

[0504] In certain embodiments, the arenavirus particle may be propagated in host cells. Specific examples of host cells that can be used include BHK-21, HEK 293, VERO or other. In a specific embodiment, the arenavirus particle may be propagated in a cell line.

[0505] In certain embodiments, the host cells are kept in culture and are transfected with one or more plasmid(s). The plasmid(s) express or encode the arenavirus genomic or antigenomic segment(s) to be generated under control of one or more expression cassettes suitable for expression in mammalian cells, e.g., consisting of a polymerase I promoter and terminator.

[0506] In specific embodiments, the host cells are kept in culture and are transfected with one or more plasmid(s). The plasmid(s) express or encode the viral gene(s) to be generated under control of one or more expression cassettes suitable for expression in mammalian cells, e.g., consisting of a polymerase I promoter and terminator.

[0507] Plasmids that can be used for the generation of the arenavirus particle can include: i) a plasmid encoding the S genomic segment e.g., pol-I S, ii) a plasmid encoding the L genomic segment e.g., pol-I L. In certain embodiments, the plasmid encoding an arenavirus polymerase that directs intracellular synthesis of the viral L and S segments can be incorporated into the transfection mixture. For example, a plasmid encoding the L protein and/or a plasmid encoding NP (pC-L and pC-NP, respectively) can be present. The L protein and NP are the minimal trans-acting factors necessary for viral RNA transcription and replication. Alternatively, intracellular synthesis of viral L and S segments, together with NP and L protein can be performed using an expression cassette with pol-I and pol-II promoters reading from opposite sides into the L and S segment cDNAs of two separate plasmids, respectively.

[0508] In certain embodiments, when the arenaviral particle is tri-segmented, plasmids that can be used for generating the tri-segmented arenavirus comprising one L segment and two S segments can include: i) two plasmids each encoding the S genome segment e.g., pol-I S, ii) a plasmid encoding the L genome segment e.g., pol-I L. Plasmids needed for the tri-segmented arenavirus comprising two L segments and one S segment are: i) two plasmids each encoding the L genome segment e.g., pol-L, ii) a plasmid encoding the S genome segment e.g., pol-I S.

[0509] In certain embodiments, when the arenaviral particle is tri-segmented, plasmids encoding an arenavirus polymerase that direct intracellular synthesis of the viral L and S segments can be incorporated into the transfection mixture. For example, a plasmid encoding the L protein and a plasmid encoding NP (pC-L and pC-NP, respectively). The L protein and NP are the minimal trans-acting factors necessary for viral RNA transcription and replication. Alternatively, intracellular synthesis of viral L and S segments, together with NP and L protein can be performed using an expression cassette with pol-I and pol-II promoters reading from opposite sides into the L and S segment cDNAs of two separate plasmids, respectively.

[0510] In certain embodiments, the arenavirus genomic or antigenomic segments are under the control of a promoter. Typically, RNA polymerase I-driven expression cassettes, RNA polymerase II-driven cassettes or T7 bacteriophage RNA polymerase driven cassettes can be used. In certain embodiments, the plasmid(s) encoding the arenavirus genomic or antigenomic segments can be the same, i.e., the genome sequence and trans-acting factors can be transcribed by a promoter from one plasmid. Specific examples of promoters include an RNA polymerase I promoter, an RNA polymerase II promoter, an RNA polymerase III promoter, a T7 promoter, an SP6 promoter or a T3 promoter.

[0511] In addition, the plasmid(s) can feature a mammalian selection marker, e.g., puromycin resistance, under control of an expression cassette suitable for gene expression in mammalian cells, e.g., polymerase II expression cassette as above, or the viral gene transcript(s) are followed by an internal ribosome entry site, such as the one of encephalomyocarditis virus, followed by the mammalian resistance marker. For production in E. coli, the plasmid additionally features a bacterial selection marker, such as an ampicillin resistance cassette.

[0512] To obtain a cell line stably expressing a desired protein, for example an arenaviral structural protein, transfection of a host cell with a plasmid(s) can be performed using any of the commonly used strategies such as calcium-phosphate, liposome-based protocols or electroporation. A few days later the suitable selection agent, e.g., puromycin, is added in titrated concentrations. Surviving clones are isolated and subcloned following standard procedures, and high-expressing clones are identified using Western blot or flow cytometry procedures with antibodies directed against the viral protein(s) of interest.

[0513] For recovering the arenavirus particle described herein, the following procedures are envisaged. First day: cells, typically 80% confluent in M6-well plates, are transfected with a mixture of the plasmids, as described above. For this one can exploit any commonly used strategies such as calcium-phosphate, liposome-based protocols or electroporation.

[0514] 3-5 days later: The cultured supernatant (arenavirus vector preparation) is harvested, aliquoted and stored at 4° C., −20° C., or −80° C., depending on how long the arenavirus vector should be stored prior use. The arenavirus vector preparation's infectious titer is assessed by an immunofocus assay. Alternatively, the transfected cells and supernatant may be passaged to a larger vessel (e.g., a T75 tissue culture flask) on day 3-5 after transfection, and culture supernatant is harvested up to five days after passage.

[0515] The present application furthermore relates to expression of a heterologous non-arenaviral polypeptide, wherein a plasmid encoding the genomic segment is modified to incorporate a nucleotide encoding a heterologous non-arenaviral polypeptide. The nucleotide encoding a heterologous non-arenaviral polypeptide can be incorporated into the plasmid using restriction enzymes and ligases by molecular cloning techniques as known to those skilled in the art.

### 5.9.2 Infectious, Replication-Defective Arenavirus Particle

[0516] Infectious, replication-defective arenavirus particles can be rescued as described above. However, once generated from DNA, the infectious, replication-deficient arenaviruses provided herein can be propagated in complementing cells. Complementing cells are cells that provide the functionality that has been eliminated from the replication-deficient arenavirus by modification of its genome (e.g., if the ORF encoding the GP protein is deleted or functionally inactivated, a complementing cell does provide the GP protein).

[0517] Owing to the removal or functional inactivation of one or more of the ORFs in arenavirus vectors (here deletion of the glycoprotein, GP, will be taken as an example), arenavirus vectors can be generated and expanded in cells providing in trans the deleted viral gene(s), e.g., the GP in the present example. Such a complementing cell line, henceforth referred to as C-cells, is generated by transfecting a cell line such as BHK-21, HEK 293, VERO or other with one or more plasmid(s) for expression of the viral gene(s) of interest (complementation plasmid, referred to as C-plasmid). The C-plasmid(s) express or encode the viral gene(s) deleted in the arenavirus vector to be generated under control of one or more expression cassettes suitable for expression in mammalian cells, e.g., a mammalian polymerase II promoter such as the EFlalpha promoter with a polyadenylation signal. In addition, the complementation plasmid features a mammalian selection marker, e.g., puromycin resistance, under control of an expression cassette suitable for gene expression in mammalian cells, e.g., polymerase II expression cassette as above, or the viral gene transcript(s) are followed by an internal ribosome entry site, such as the one of encephalomyocarditis virus, followed by the mammalian resistance marker. For production in E. coli, the plasmid additionally features a bacterial selection marker, such as an ampicillin resistance cassette.

[0518] Cells that can be used, e.g., BHK-21, HEK 293, MC57G or other, are kept in culture and are transfected with the complementation plasmid(s) using any of the commonly used strategies such as calcium-phosphate, liposome-based protocols or electroporation. A few days later the suitable selection agent, e.g., puromycin, is added in titrated concentrations. Surviving clones are isolated and subcloned following standard procedures, and high-expressing C-cell clones are identified using Western blot or flow cytometry procedures with antibodies directed against the viral protein(s) of interest. As an alternative to the use of stably transfected C-cells transient transfection of normal cells can complement the missing viral gene(s) in each of the steps where C-cells will be used below. In addition, a helper virus can be used to provide the missing functionality in trans.

[0519] Plasmids can be of two types: i) two plasmids, referred to as TF-plasmids for expressing intracellularly in C-cells the minimal trans-acting factors of the arenavirus, is derived from e.g., NP and L proteins of LCMV in the present example; and ii) plasmids, referred to as GS-plasmids, for expressing intracellularly in C-cells the arenavirus vector genome segments, e.g., the segments with designed modifications. TF-plasmids express the NP and L proteins of the respective arenavirus vector under control of an expression cassette suitable for protein expression in mammalian cells, typically e.g., a mammalian polymerase II promoter such as the CMV or EF1alpha promoter, either one of them preferentially in combination with a polyadenylation signal. GS-plasmids express the small (S) and the large (L) genome segments of the vector. Typically, polymerase I-driven expression cassettes or T7 bacteriophage RNA polymerase (T7-) driven expression cassettes can be used, the latter preferentially with a 3′-terminal ribozyme for processing of the primary transcript to yield the correct end. In the case of using a T7-based system, expression of T7 in C-cells must be provided by either including in the recovery process an additional expression plasmid, constructed analogously to TF-plasmids, providing T7, or C-cells are constructed to additionally express T7 in a stable manner. In certain embodiments, TF and GS plasmids can be the same, i.e., the genome sequence and trans-acting factors can be transcribed by T7, polI and polII promoters from one plasmid.

[0520] For recovering of the arenavirus vector, the following procedures can be used. First day: C-cells, typically 80% confluent in M6-well plates, are transfected with a mixture of the two TF-plasmids plus the two GS-plasmids. In certain embodiments, the TF and GS plasmids can be the same, i.e., the genome sequence and trans-acting factors can be transcribed by T7, polI and polII promoters from one plasmid. For this one can exploit any of the commonly used strategies such as calcium-phosphate, liposome-based protocols or electroporation.

[0521] 3-5 days later: The culture supernatant (arenavirus vector preparation) is harvested, aliquoted and stored at 4° C., −20° C. or −80° C. depending on how long the arenavirus vector should be stored prior to use. Then the arenavirus vector preparation's infectious titer is assessed by an immunofocus assay on C-cells. Alternatively, the transfected cells and supernatant may be passaged to a larger vessel (e.g., a T75 tissue culture flask) on day 3-5 after transfection, and culture supernatant is harvested up to five days after passage.

[0522] The invention furthermore relates to expression of an antigen in a cell culture wherein the cell culture is infected with an infectious, replication-deficient arenavirus expressing an antigen. When used for expression of an antigen in cultured cells, the following two procedures can be used:

[0523] i) The cell type of interest is infected with the arenavirus vector preparation described herein at a multiplicity of infection (MOI) of one or more, e.g., two, three or four, resulting in production of the antigen in all cells already shortly after infection.

[0524] ii) Alternatively, a lower MOI can be used and individual cell clones can be selected for their level of virally driven antigen expression. Subsequently individual clones can be expanded infinitely owing to the non-cytolytic nature of arenavirus vectors. Irrespective of the approach, the antigen can subsequently be collected (and purified) either from the culture supernatant or from the cells themselves, depending on the properties of the antigen produced. However, the invention is not limited to these two strategies, and other ways of driving expression of antigen using infectious, replication-deficient arenaviruses as vectors may be considered.

### 5.10 Methods of Using the Compositions Provided Herein—Generation and Rescue of Arenavirus Particles

[0525] In certain embodiments, the nucleotide sequence as provided herein (see Section 5.4) can be used to generate and/or rescue arenavirus particles. In certain embodiments, the arenavirus particles as provided herein (see Section 5.5) can be used to generate and/or rescue arenavirus particles. In certain embodiments, the arenavirus genomic or antigenomic segment as provided herein (see Section 5.6) can be used to generate and/or rescue arenavirus particles.

[0526] Generally, arenavirus particles can be recombinantly produced by standard reverse genetic techniques as described for LCMV (see Flatz et al., 2006, Proc Natl Acad Sci USA 103:4663-4668; Sanchez et al., 2006, Virology 350:370; Ortiz-Riano et al., 2013, J Gen Virol. 94:1175-88, which are incorporated by reference herein).

[0527] In certain embodiments, an arenavirus particle generated or rescued can be bi-segmented. In other embodiments, an arenavirus particle generated or rescued can be tri-segmented. A tri-segmented arenavirus particle can be recombinantly produced by reverse genetic techniques known in the art, for example as described in International Publication No.: WO 2016/075250 A1.

### 5.10.1 Infectious and Replication Competent Arenavirus Particle

[0528] In certain embodiments, the method of generating a bi-segmented arenavirus particle comprises (i) transfecting into a host cell one or more DNA sequences as described in Section 5.4, or one or more RNA sequences as described in Section 5.4, or one or more RNA sequences each transcribed in vitro from the DNA sequence as described in Section 5.4; (ii) transfecting into the host cell nucleotide sequences driving intracellular expression of arenaviral trans-acting factors; (iii) maintaining the host cell under conditions suitable for virus formation; and (iv) harvesting the arenavirus particle. In certain more specific embodiments, the DNA is comprised in a plasmid.

[0529] In certain embodiments, when the arenavirus particle is tri-segmented, the method of generating the arenavirus particle comprises (i) transfecting into a host cell one or more DNA sequences as described in Section 5.4, one or more RNA sequences as described in Section 5.4, or one or more RNA sequences each transcribed in vitro from the DNA sequence as described in Section 5.4, wherein the above nucleotide sequences encode the one L segment and two S segments or two L segments and one S segment; (ii) transfecting into the host cell nucleotide sequences driving intracellular expression of arenaviral trans-acting factors; (iii) maintaining the host cell under conditions suitable for virus formation; and (iv) harvesting the arenavirus particle. In certain more specific embodiments, the DNA is comprised in a plasmid.

[0530] In certain embodiments, the method of generating a bi-segmented arenavirus particle comprises (i) transfecting into a host cell one or more cDNA sequences of the mRNA transcripts of the genome of the arenavirus particle as described in Section 5.5 or one or more RNA sequences each transcribed in vitro from the cDNA of the mRNA transcript of the genome of the arenavirus particle as described in Section 5.5; (ii) transfecting into the host cell nucleotide sequences driving intracellular expression of arenaviral trans-acting factors; (iii) maintaining the host cell under conditions suitable for virus formation; and (iv) harvesting the arenavirus particle. In certain more specific embodiments, the DNA is comprised in a plasmid.

[0531] In certain embodiments, when the arenavirus particle is tri-segmented, the method of generating the arenavirus particle comprises (i) transfecting into a host cell one or more cDNA sequences of the mRNA transcripts of the genome of the arenavirus particle as described in Section 5.5 or one or more RNA sequences each transcribed in vitro from the cDNA of the mRNA transcript of the genome of the arenavirus particle as described in Section 5.5, wherein the above nucleotide sequences encode the one L segment and two S segments or two L segments and one S segment; (ii) transfecting into the host cell nucleotide sequences driving intracellular expression of arenaviral trans-acting factors; (iii) maintaining the host cell under conditions suitable for virus formation; and (iv) harvesting the arenavirus particle. In certain more specific embodiments, the DNA is comprised in a plasmid.

[0532] In certain embodiments, the method of generating a bi-segmented arenavirus particle comprises (i) transfecting into a host cell the cDNA sequences of the arenavirus genomic or antigenomic segment as described in Section 5.6 or one or more RNA sequences each transcribed in vitro from the cDNA sequence of the arenavirus genomic or antigenomic segment as described in Section 5.6; (ii) transfecting into the host cell nucleotide sequences driving intracellular expression of arenaviral trans-acting factors; (iii) maintaining the host cell under conditions suitable for virus formation; and (iv) harvesting the arenavirus particle. In certain more specific embodiments, the DNA is comprised in a plasmid.

[0533] In certain embodiments, when the arenavirus particle is tri-segmented, the method of generating the arenavirus particle comprises (i) transfecting into a host cell the cDNA sequences of the arenavirus genomic or antigenomic segment as described in Section 5.6 or one or more RNA sequences each transcribed in vitro from the cDNA sequence of the arenavirus genomic or antigenomic segment as described in Section 5.6, wherein the above nucleotide sequences encode the one L segment and two S segments or two L segments and one S segment; (ii) transfecting into the host cell nucleotide sequences driving intracellular expression of arenaviral trans-acting factors; (iii) maintaining the host cell under conditions suitable for virus formation; and (iv) harvesting the arenavirus particle. In certain more specific embodiments, the DNA is comprised in a plasmid.

[0534] More details on generation of infectious and replication competent arenavirus particles are described in Section 5.9.1.

### 5.10.2 Infectious, Replication-Defective Arenavirus Particle

[0535] Infectious, replication-defective arenavirus particles can be rescued as described above. More details on generation of infectious, replication-defective arenavirus particles are described in Section 5.9.2.

### 5.11 Methods of Using the Compositions Provided Herein—Vaccine

[0536] The present application furthermore relates to vaccines, immunogenic compositions (e.g., vaccine formulations), and pharmaceutical compositions comprising a nucleotide sequence as described in Section 5.4 and related expression products, arenavirus particles and arenavirus genomic or antigenomic segments. The present application also relates to vaccines, immunogenic compositions (e.g., vaccine formulations), and pharmaceutical compositions comprising an arenavirus particle as described in Section 5.5. The present application further relates to vaccines, immunogenic compositions (e.g., vaccine formulations), and pharmaceutical compositions comprising an arenavirus genomic or antigenomic segment as described in Section 5.6 and related arenavirus particles. The present application further relates to vaccines, immunogenic compositions (e.g., vaccine formulations), and pharmaceutical compositions comprising a translation product as described in Section 5.7. The present application further relates to vaccines, immunogenic compositions (e.g., vaccine formulations), and pharmaceutical compositions comprising a cDNA, DNA sequence and/or DNA expression vector related to the nucleotide sequences as described in Section 5.4, the arenavirus particle as described in Section 5.5, and/or the arenavirus genomic or antigenomic segments as described in Section 5.6, for example a DNA sequence encoding the arenavirus genomic or antigenomic segment as described in Section 5.6. Such vaccines, immunogenic compositions and pharmaceutical compositions can be formulated according to standard procedures in the art.

[0537] It will be readily apparent to one of ordinary skill in the relevant arts that suitable modifications and adaptations to the methods and applications described herein can be obvious and can be made without departing from the scope or any embodiment thereof.

[0538] In certain embodiments, provided herein are compositions comprising the nucleotide sequences as described in Section 5.4. In another embodiment, provided herein are compositions comprising the arenavirus particle as described in Section 5.5. In another embodiment, provided herein are compositions comprising the arenavirus genomic or antigenomic segments as described in Section 5.6. In another embodiment, provided herein are compositions comprising the translation product as described in Section 5.7. In another embodiment, provided herein are compositions comprising a cDNA, DNA sequence and/or DNA expression vectors related to the nucleotide sequences as described in Section 5.4, the arenavirus particle as described in Section 5.5, and/or the arenavirus genomic or antigenomic segments as described in Section 5.6, for example a DNA sequence encoding the arenavirus genomic or antigenomic segment as described in Section 5.6. Such compositions can be used in methods of treatment and prevention of disease. In a specific embodiment, the compositions described herein are used in the treatment of subjects infected with, or susceptible to, an infection. In other embodiments, the compositions described herein are used in the treatment of subjects susceptible to or exhibiting symptoms characteristic of cancer or tumorigenesis or are diagnosed with cancer. In another specific embodiment, the immunogenic compositions provided herein can be used to induce an immune response in a host to whom the composition is administered. The immunogenic compositions described herein can be used as vaccines and can accordingly be formulated as pharmaceutical compositions. In a specific embodiment, the immunogenic compositions described herein are used in the prevention or treatment of infection or cancer of subjects (e.g., human subjects). In other embodiments, the vaccine, immunogenic composition or pharmaceutical composition are suitable for veterinary and/or human administration.

[0539] In certain embodiments, provided herein are immunogenic compositions comprising an arenavirus vector as described herein. In certain embodiments, such an immunogenic composition further comprises a pharmaceutically acceptable excipient. In certain embodiments, such an immunogenic composition further comprises an adjuvant. The adjuvant for administration in combination with a composition described herein may be administered before, concomitantly with, or after administration of said composition. In some embodiments, the term “adjuvant” refers to a compound that when administered in conjunction with or as part of a composition described herein augments, enhances and/or boosts the immune response to an arenavirus particle or tri-segmented arenavirus particle and, most importantly, the gene products it vectorises, but when the compound is administered alone does not generate an immune response to the arenavirus particle or tri-segmented arenavirus particle and the gene products vectorised by the latter. In some embodiments, the adjuvant generates an immune response to the arenavirus particle or tri-segmented arenavirus particle and the gene products vectorised by the latter and does not produce an allergy or other adverse reaction. Adjuvants can enhance an immune response by several mechanisms including, e.g., lymphocyte recruitment, stimulation of B and/or T cells, and stimulation of macrophages or dendritic cells. When a vaccine or immunogenic composition provided herein comprises adjuvants or is administered together with one or more adjuvants, the adjuvants that can be used include, but are not limited to, mineral salt adjuvants or mineral salt gel adjuvants, particulate adjuvants, microparticulate adjuvants, mucosal adjuvants, and immunostimulatory adjuvants. Examples of adjuvants include, but are not limited to, aluminum salts (alum) (such as aluminum hydroxide, aluminum phosphate, and aluminum sulfate), 3 De-O-acylated monophosphoryl lipid A (MPL) (see GB 2220211), MF59 (Novartis), AS03 (GlaxoSmithKline), AS04 (GlaxoSmithKline), polysorbate 80 (Tween 80; ICL Americas, Inc.), imidazopyridine compounds (see International Application No. PCT/US2007/064857, published as International Publication No. WO2007/109812), imidazoquinoxaline compounds (see International Application No. PCT/US2007/064858, published as International Publication No. WO2007/109813) and saponins, such as QS21 (see Kensil et al., 1995, in Vaccine Design: The Subunit and Adjuvant Approach (eds. Powell & Newman, Plenum Press, NY); U.S. Pat. No. 5,057,540). In some embodiments, the adjuvant is Freund's adjuvant (complete or incomplete). Other adjuvants are oil in water emulsions (such as squalene or peanut oil), optionally in combination with immune stimulants, such as monophosphoryl lipid A (see Stoute et al., 1997, N. Engl. J. Med. 336, 86-91).

[0540] The compositions comprise the bi-segmented arenaviruses particle or tri-segmented arenavirus particle described herein alone or together with a pharmaceutically acceptable carrier. Suspensions or dispersions of the arenavirus particle or tri-segmented arenavirus particle, especially isotonic aqueous suspensions or dispersions, can be used. The pharmaceutical compositions may be sterilized and/or may comprise excipients, e.g., preservatives, stabilizers, wetting agents and/or emulsifiers, solubilizers, salts for regulating osmotic pressure and/or buffers and are prepared in a manner known per se, for example by means of conventional dispersing and suspending processes. In certain embodiments, such dispersions or suspensions may comprise viscosity-regulating agents. The suspensions or dispersions are kept at temperatures around 2° C. to 8° C., or preferentially for longer storage may be frozen and then thawed shortly before use, or alternatively may be lyophilized for storage. For injection, the vaccine or immunogenic preparations may be formulated in aqueous solutions, preferably in physiologically compatible buffers such as Hanks's solution, Ringer's solution, or physiological saline buffer. The solution may contain formulatory agents such as suspending, stabilizing and/or dispersing agents.

[0541] In certain embodiments, the compositions described herein additionally comprise a preservative, e.g., the mercury derivative thimerosal. In a specific embodiment, the pharmaceutical compositions described herein comprise 0.001% to 0.01% thimerosal. In other embodiments, the pharmaceutical compositions described herein do not comprise a preservative.

[0542] The pharmaceutical compositions comprise from about 10³ to about 10¹¹ focus forming units of the bi-segmented arenavirus particle or tri-segmented arenavirus particle.

[0543] In one embodiment, administration of the pharmaceutical composition is parenteral administration. Parenteral administration can be intravenous or subcutaneous administration. Accordingly, unit dose forms for parenteral administration are, for example, ampoules or vials, e.g., vials containing from about 10³ to 10¹⁰ focus forming units or 10⁵ to 10¹⁵ physical particles of the arenavirus particle or tri-segmented arenavirus particle.

[0544] In another embodiment, a vaccine or immunogenic composition provided herein is administered to a subject by, including but not limited to, oral, intradermal, intramuscular, intraperitoneal, intravenous, topical, subcutaneous, percutaneous, intranasal and inhalation routes, intra-tumoral, and via scarification (scratching through the top layers of skin, e.g., using a bifurcated needle). Specifically, subcutaneous or intravenous routes can be used.

[0545] For administration intranasally or by inhalation, the preparation for use according to the present invention can be conveniently delivered in the form of an aerosol spray presentation from pressurized packs or a nebulizer, with the use of a suitable propellant, e.g., dichlorodifluoromethane, trichlorofluoromethane, dichlorotetrafluoroethane, carbon dioxide or other suitable gas. In the case of a pressurized aerosol the dosage unit may be determined by providing a valve to deliver a metered amount. Capsules and cartridges of, e.g., gelatin for use in an inhaler or insufflators may be formulated containing a powder mix of the compound and as suitable powder base such as lactose or starch.

[0546] The dosage of the active ingredient depends upon the type of vaccination or immunotherapy and upon the subject, and their age, weight, individual condition, the individual pharmacokinetic data, and the mode of administration. In certain embodiments, an in vitro assay is employed to help identify optimal dosage ranges. Effective doses may be extrapolated from dose response curves derived from in vitro or animal model test systems.

[0547] In certain embodiments, the vaccine, immunogenic composition, or pharmaceutical composition comprising an arenavirus particle or the tri-segmented arenavirus particle can be used as a live vaccination or immunotherapy. Exemplary doses for a live arenavirus particle may vary from 10-100, or more, PFU of live virus per dose. In some embodiments, suitable dosages of an arenavirus particle or the tri-segmented arenavirus particle are 10², 5×10², 10³, 5×10³, 10⁴, 5×10⁴, 10⁵, 5×10⁵, 10⁶, 5×10⁶, 10⁷, 5×10⁷, 10⁸, 5×10⁸, 1×10⁹, 5×10⁹, 1×10¹⁰, 5×10¹⁰, 1×10¹¹, 5×10¹¹ or 10¹² pfu, and can be administered to a subject once, twice, three or more times with intervals as often as needed. In another embodiment, a live arenavirus is formulated in a dose that is of a volume selected from the group consisting of 0.2, 0.5, 1, 2, 5, 7, 10, 15, 20, 25, 30, 35, 40, 45, and 50 mL. In certain embodiments, the dose contains 10^{5.5}-10^{9.5} infectious focus forming units of live arenavirus particle. In another embodiment, an inactivated vaccine is formulated such that it contains about 15 μg to about 100 μg, about 15 μg to about 75 μg, about 15 μg to about 50 μg, or about 15 μg to about 30 μg of an arenavirus.

[0548] In certain embodiments, for administration to children, two doses of a bi-segmented arenavirus particle or a tri-segmented arenavirus particle described herein or a composition thereof, given at least one month apart, are administered to a child. In specific embodiments for administration to adults, a single dose of the arenavirus particle or tri-segmented arenavirus particle described herein or a composition thereof is given. In another embodiment, two doses of a bi-segmented arenavirus particle or a tri-segmented arenavirus particle described herein or a composition thereof, given at least one month apart, are administered to an adult. In another embodiment, a young child (six months to nine years old) may be administered a bi-segmented arenavirus particle or a tri-segmented arenavirus particle described herein or a composition thereof for the first time in two doses given one month apart. In a particular embodiment, a child who received only one dose in their first year of vaccination or immunotherapy should receive two doses in the following year. In some embodiments, two doses administered 4 weeks apart are preferred for children 2-8 years of age who are administered an immunogenic composition described herein, for the first time. In certain embodiments, for children 6-35 months of age, a half dose (0.25 ml) may be preferred, in contrast to 0.5 ml which may be preferred for subjects over three years of age.

[0549] In certain embodiments, the compositions can be administered to the patient in a single dosage comprising a therapeutically effective amount of the arenavirus particle or the tri-segmented arenavirus particle. In some embodiments, the bi-segmented arenavirus particle or tri-segmented arenavirus particle can be administered to the patient in a single dose comprising a therapeutically effective amount of a bi-segmented arenavirus particle or tri-segmented arenavirus particle and, one or more pharmaceutical compositions, each in a therapeutically effective amount.

[0550] In certain embodiments, the composition is administered to the patient as a single dose followed by a second dose three to six weeks later. In accordance with these embodiments, the booster inoculations may be administered to the subjects at six to twelve month intervals following the second inoculation. In certain embodiments, the booster inoculations may utilize a different arenavirus or composition thereof. In some embodiments, the administration of the same composition as described herein may be repeated and separated by at least 1 day, 2 days, 3 days, 4 days, 5 days, 10 days, 15 days, 30 days, 45 days, 2 months, 75 days, 3 months, or at least 6 months.

[0551] Also provided herein, are processes and to the use the arenavirus particle or the tri-segmented arenavirus particle for the manufacture of vaccines in the form of pharmaceutical preparations, which comprise the arenavirus particle or tri-segmented arenavirus particle as an active ingredient. The pharmaceutical compositions of the present application are prepared in a manner known per se, for example by means of conventional mixing and/or dispersing processes.

### 5.12 Compositions, Administration, and Dosage

[0552] The present application furthermore relates to vaccines, immunogenic compositions (e.g., vaccine formulations), and pharmaceutical compositions comprising an arenavirus particle or a tri-segmented arenavirus particle as described herein. Such vaccines, immunogenic compositions and pharmaceutical compositions can be formulated according to standard procedures in the art.

[0553] It will be readily apparent to one of ordinary skill in the relevant arts that suitable modifications and adaptations to the methods and applications described herein can be obvious and can be made without departing from the scope of the scope or any embodiment thereof.

[0554] In another embodiment, provided herein are compositions comprising an arenavirus particle or a tri-segmented arenavirus particle described herein. Such compositions can be used in methods of treatment and prevention of disease. In a specific embodiment, the compositions described herein are used in the treatment of subjects infected with and infectious agent, or susceptible to an infection. In other embodiments, the compositions described herein are used in the treatment of subjects susceptible to or exhibiting symptoms characteristic of cancer or tumorigenesis or are diagnosed with cancer. In another specific embodiment, the immunogenic compositions provided herein can be used to induce an immune response in a host to whom the composition is administered. The immunogenic compositions described herein can be used as vaccines and can accordingly be formulated as pharmaceutical compositions. In a specific embodiment, the immunogenic compositions described herein are used in the prevention of infection or cancer of subjects (e.g., human subjects). In other embodiments, the vaccine, immunogenic composition or pharmaceutical composition are suitable for veterinary and/or human administration.

[0555] In certain embodiments, provided herein are immunogenic compositions comprising an arenavirus vector as described herein. In certain embodiments, such an immunogenic composition further comprises a pharmaceutically acceptable excipient. In certain embodiments, such an immunogenic composition further comprises an adjuvant. The adjuvant for administration in combination with a composition described herein may be administered before, concomitantly with, or after administration of said composition. In some embodiments, the term “adjuvant” refers to a compound that when administered in conjunction with or as part of a composition described herein augments, enhances and/or boosts the immune response to a arenavirus particle or tri-segmented arenavirus particle and, most importantly, the gene products it vectorises, but when the compound is administered alone does not generate an immune response to the arenavirus particle or tri-segmented arenavirus particle and the gene products vectorised by the latter. In some embodiments, the adjuvant generates an immune response to the arenavirus particle or tri-segmented arenavirus particle and the gene products vectorised by the latter and does not produce an allergy or other adverse reaction. Adjuvants can enhance an immune response by several mechanisms including, e.g., lymphocyte recruitment, stimulation of B and/or T cells, and stimulation of macrophages or dendritic cells. When a vaccine or immunogenic composition provided herein comprises adjuvants or is administered together with one or more adjuvants, the adjuvants that can be used include, but are not limited to, mineral salt adjuvants or mineral salt gel adjuvants, particulate adjuvants, microparticulate adjuvants, mucosal adjuvants, and immunostimulatory adjuvants. Examples of adjuvants include, but are not limited to, aluminum salts (alum) (such as aluminum hydroxide, aluminum phosphate, and aluminum sulfate), 3 De-O-acylated monophosphoryl lipid A (MPL) (see GB 2220211), MF59 (Novartis), AS03 (GlaxoSmithKline), AS04 (GlaxoSmithKline), polysorbate 80 (Tween 80; ICL Americas, Inc.), imidazopyridine compounds (see International Application No. PCT/US2007/064857, published as International Publication No. WO2007/109812), imidazoquinoxaline compounds (see International Application No. PCT/US2007/064858, published as International Publication No. WO2007/109813) and saponins, such as QS21 (see Kensil et al., 1995, in Vaccine Design: The Subunit and Adjuvant Approach (eds. Powell & Newman, Plenum Press, NY); U.S. Pat. No. 5,057,540). In some embodiments, the adjuvant is Freund's adjuvant (complete or incomplete). Other adjuvants are oil in water emulsions (such as squalene or peanut oil), optionally in combination with immune stimulants, such as monophosphoryl lipid A (see Stoute et al., 1997, N. Engl. J. Med. 336, 86-91).

[0556] The compositions comprise the arenaviruses particle or tri-segmented arenavirus particle described herein alone or together with a pharmaceutically acceptable carrier. Suspensions or dispersions of the arenavirus particle or tri-segmented arenavirus particle, especially isotonic aqueous suspensions or dispersions, can be used. The pharmaceutical compositions may be sterilized and/or may comprise excipients, e.g., preservatives, stabilizers, wetting agents and/or emulsifiers, solubilizers, salts for regulating osmotic pressure and/or buffers and are prepared in a manner known per se, for example by means of conventional dispersing and suspending processes. In certain embodiments, such dispersions or suspensions may comprise viscosity-regulating agents. The suspensions or dispersions are kept at temperatures around 2° C. to 8° C., or preferentially for longer storage may be frozen and then thawed shortly before use, or alternatively may be lyophilized for storage. For injection, the vaccine or immunogenic preparations may be formulated in aqueous solutions, preferably in physiologically compatible buffers such as Hanks's solution, Ringer's solution, or physiological saline buffer. The solution may contain formulatory agents such as suspending, stabilizing and/or dispersing agents.

[0557] In certain embodiments, the compositions described herein additionally comprise a preservative, e.g., the mercury derivative thimerosal. In a specific embodiment, the pharmaceutical compositions described herein comprise 0.001% to 0.01% thimerosal. In other embodiments, the pharmaceutical compositions described herein do not comprise a preservative.

[0558] The pharmaceutical compositions comprise from about 10³ to about 10¹¹ focus forming units of the arenavirus particle or tri-segmented arenavirus particle.

[0559] In one embodiment, administration of the pharmaceutical composition is parenteral administration. Parenteral administration can be intravenous or subcutaneous administration. Accordingly, unit dose forms for parenteral administration are, for example, ampoules or vials, e.g., vials containing from about 10³ to 10¹⁰ focus forming units or 10⁵ to 10¹⁵ physical particles of the arenavirus particle or tri-segmented arenavirus particle.

[0560] In another embodiment, a vaccine or immunogenic composition provided herein is administered to a subject by, including but not limited to, oral, intradermal, intramuscular, intraperitoneal, intravenous, topical, subcutaneous, percutaneous, intranasal and inhalation routes, and via scarification (scratching through the top layers of skin, e.g., using a bifurcated needle). Specifically, subcutaneous or intravenous routes can be used.

[0561] For administration intranasally or by inhalation, the preparation for use according to the present invention can be conveniently delivered in the form of an aerosol spray presentation from pressurized packs or a nebulizer, with the use of a suitable propellant, e.g., dichlorodifluoromethane, trichlorofluoromethane, dichlorotetrafluoroethane, carbon dioxide or other suitable gas. In the case of a pressurized aerosol the dosage unit may be determined by providing a valve to deliver a metered amount. Capsules and cartridges of, e.g., gelatin for use in an inhaler or insufflators may be formulated containing a powder mix of the compound and as suitable powder base such as lactose or starch.

[0562] The dosage of the active ingredient depends upon the type of vaccination or immunotherapy and upon the subject, and their age, weight, individual condition, the individual pharmacokinetic data, and the mode of administration. In certain embodiments, an in vitro assay is employed to help identify optimal dosage ranges. Effective doses may be extrapolated from dose response curves derived from in vitro or animal model test systems.

[0563] In certain embodiments, the vaccine, immunogenic composition, or pharmaceutical composition comprising an arenavirus particle or the tri-segmented arenavirus particle can be used as a live vaccination or immunotherapy. Exemplary doses for a live arenavirus particle may vary from 10-100, or more, PFU of live virus per dose. In some embodiments, suitable dosages of an arenavirus particle or the tri-segmented arenavirus particle are 10², 5×10², 10³, 5×10³, 10⁴, 5×10⁴, 10⁵, 5×10⁵, 10⁶, 5×10⁶, 10⁷, 5×10⁷, 10⁸, 5×10⁸, 1×10⁹, 5×10⁹, 1×10¹⁰, 5×10¹⁰, ×1×10¹¹, 5×10¹¹ or 10¹² pfu, and can be administered to a subject once, twice, three or more times with intervals as often as needed. In another embodiment, a live arenavirus is formulated such that a 0.2-mL dose contains 10^{6.5}-10^{7.5} fluorescent focal units of live arenavirus particle. In another embodiment, an inactivated vaccine is formulated such that it contains about 15 μg to about 100 μg, about 15 μg to about 75 μg, about 15 μg to about 50 μg, or about 15 μg to about 30 μg of an arenavirus.

[0564] In certain embodiments, for administration to children, two doses of an arenavirus particle or a tri-segmented arenavirus particle described herein or a composition thereof, given at least one month apart, are administered to a child. In specific embodiments for administration to adults, a single dose of the arenavirus particle or tri-segmented arenavirus particle described herein or a composition thereof is given. In another embodiment, two doses of an arenavirus particle or a tri-segmented arenavirus particle described herein or a composition thereof, given at least one month apart, are administered to an adult. In another embodiment, a young child (six months to nine years old) may be administered an arenavirus particle or a tri-segmented arenavirus particle described herein or a composition thereof for the first time in two doses given one month apart. In a particular embodiment, a child who received only one dose in their first year of vaccination or immunotherapy should receive two doses in the following year. In some embodiments, two doses administered 4 weeks apart are preferred for children 2-8 years of age who are administered an immunogenic composition described herein, for the first time. In certain embodiments, for children 6-35 months of age, a half dose (0.25 ml) may be preferred, in contrast to 0.5 ml which may be preferred for subjects over three years of age.

[0565] In certain embodiments, the compositions can be administered to the patient in a single dosage comprising a therapeutically effective amount of the arenavirus particle or the tri-segmented arenavirus particle. In some embodiments, the arenavirus particle or tri-segmented arenavirus particle can be administered to the patient in a single dose comprising a therapeutically effective amount of an arenavirus particle or tri-segmented arenavirus particle and, one or more pharmaceutical compositions, each in a therapeutically effective amount.

[0566] In certain embodiments, the composition is administered to the patient as a single dose followed by a second dose three to six weeks later. In accordance with these embodiments, the booster inoculations may be administered to the subjects at six to twelve month intervals following the second inoculation. In certain embodiments, the booster inoculations may utilize a different arenavirus or composition thereof. In some embodiments, the administration of the same composition as described herein may be repeated and separated by at least 1 day, 2 days, 3 days, 4 days, 5 days, 10 days, 15 days, 30 days, 45 days, 2 months, 75 days, 3 months, or at least 6 months.

[0567] Also provided herein, are processes and to the use the arenavirus particle or the tri-segmented arenavirus particle for the manufacture of vaccines in the form of pharmaceutical preparations, which comprise the arenavirus particle or tri-segmented arenavirus particle as an active ingredient. The pharmaceutical compositions of the present application are prepared in a manner known per se, for example by means of conventional mixing and/or dispersing processes.

### 5.13 Assays

[0568] In certain embodiments, an arenavirus particle described herein comprises the nucleotide sequence provided herein (see Section 5.4.2). In certain embodiments, an arenavirus particle described herein is engineered such that an arenaviral ORF is separated over two or more mRNA transcripts (see Section 5.5). In certain embodiments, an arenavirus particle described herein is derived from an arenavirus genomic or antigenomic segment provided herein (see Section 5.6). In certain embodiments, an arenavirus particle described herein comprises an arenavirus genomic or antigenomic segment provided herein (see Section 5.6).

[0569] In certain embodiments, the arenavirus particle provided herein is genetically stable, i.e. the inability of the arenavirus particle to revert to wild-type-like (more virulent) replication behavior in the host (genetic stability). In certain embodiments, the genetic stability may be demonstrated using assays described in this Section and Section 6.

[0570] In certain embodiments, the arenavirus particle provided herein shows high-level transgene expression to elicit strong immune responses against the desired target antigen(s) (transgene expression levels). In certain embodiments, the high-level transgene expression may be demonstrated using assays described in this Section and Section 6.

[0571] In certain embodiments, the arenavirus particle expresses a heterologous non-arenaviral polypeptide. In certain embodiments, the heterologous non-arenaviral polypeptide is under control of an arenavirus 3′ UTR. In certain embodiments, the expression level of the heterologous non-arenaviral polypeptide is at least about 1%, 2%, 3%, 4%, 5%, 6%, 7%, 8%, 9%, 10%, 15%, 20%, 30%, 40%, 50%, 60%, 70%, 80%, 90%, 100%, 1.5-fold, 2-fold, 3-fold, 4-fold, 5-fold, 6-fold, 7-fold, 8-fold, 9-fold, 10-fold, 12-fold, 15-fold, 18-fold, 20-fold, 25-fold, or 30-fold higher than the expression level of the same heterologous non-arenaviral polypeptide expressed under control of the respective arenavirus 5′ UTR. In certain embodiments, the expression level of the heterologous non-arenaviral polypeptide is about 1%, 2%, 3%, 4%, 5%, 6%, 7%, 8%, 9%, 10%, 15%, 20%, 30%, 40%, 50%, 60%, 70%, 80%, 90%, 100%, 1.5-fold, 2-fold, 3-fold, 4-fold, 5-fold, 6-fold, 7-fold, 8-fold, 9-fold, 10-fold, 12-fold, 15-fold, 18-fold, 20-fold, 25-fold, or 30-fold higher than the expression level of the same heterologous non-arenaviral polypeptide expressed under control of the respective arenavirus 5′ UTR. In certain embodiments, the expression level of the heterologous non-arenaviral polypeptide is 1%, 2%, 3%, 4%, 5%, 6%, 7%, 8%, 9%, 10%, 15%, 20%, 30%, 40%, 50%, 60%, 70%, 80%, 90%, 100%, 1.5-fold, 2-fold, 3-fold, 4-fold, 5-fold, 6-fold, 7-fold, 8-fold, 9-fold, 10-fold, 12-fold, 15-fold, 18-fold, 20-fold, 25-fold, or 30-fold higher than the expression level of the same heterologous non-arenaviral polypeptide expressed under control of the respective arenavirus 5′ UTR. In certain embodiments, at least about, or about, 5%, 10%, 15%, 20%, 25%, 30%, 35%, 40%, 45%, 50%, 55%, 60%, 65%, 70%, 75%, 80%, 85%, 90%, 95%, 99%, or 100% of cells express the heterologous non-arenaviral polypeptide after an arenavirus of the present disclosure (e.g., expressing a heterologous non-arenaviral polypeptide under control of an arenavirus 3′ UTR) is introduced to (or infects) the cells (e.g., to a population of cells). In certain embodiments, the proportion of cells that express the heterologous non-arenaviral polypeptide after an arenavirus of the present disclosure (e.g., expressing a heterologous non-arenaviral polypeptide under control of an arenavirus 3′ UTR) is introduced to (or infects) a population of cells is higher as compared to the proportion of cells that express the heterologous non-arenaviral polypeptide after an arenavirus expressing the same heterologous non-arenaviral polypeptide under control of an arenavirus 5′ UTR is introduced to (or infects) a population of cells. In certain embodiments, at least about, or about 1%, 2%, 3%, 4%, 5%, 6%, 7%, 8%, 9%, 10%, 15%, 20%, 25%, 30%, 35%, 40%, 45%, 50%, 55%, 60%, 65%, 70%, 75%, 80%, 85%, 90%, 95%, 99%, or 100% more cells express the heterologous non-arenaviral polypeptide after an arenavirus of the present disclosure (e.g., expressing a heterologous non-arenaviral polypeptide under control of an arenavirus 3′ UTR) is introduced to (or infects) a population of cells as compared to the proportion (or amount) of cells that express the heterologous non-arenaviral polypeptides after an arenavirus expressing the same heterologous non-arenaviral polypeptide under control of an arenavirus 5′ UTR is introduced to (or infects) a comparable population of cells. In certain embodiments, the cells are from a biological sample from a subject. In certain embodiments, the biological sample is from an organ (e.g., spleen). In certain embodiments, the biological sample is a blood sample.

[0572] In certain embodiments, at least about, or about, 5%, 10%, 15%, 20%, 25%, 30%, 35%, 40%, 45%, 50%, 55%, 60%, 65%, 70%, 75%, 80%, 85%, 90%, 95%, 99%, or 100% of cells express a heterologous non-arenaviral polypeptide and/or express a second heterologous non-arenaviral polypeptide after an arenavirus of the present disclosure (e.g., expressing the heterologous non-arenaviral polypeptide under control of an arenavirus 3′ UTR and/or expressing the second heterologous non-arenaviral polypeptide under control of an arenavirus 3′ UTR) is introduced to (or infects) the cells (e.g., to a population of cells). In certain embodiments, the proportion of cells that express the heterologous non-arenaviral polypeptide and/or express the second heterologous non-arenaviral polypeptide after an arenavirus of the present disclosure (e.g., expressing the heterologous non-arenaviral polypeptide under control of an arenavirus 3′ UTR and/or expressing the second heterologous non-arenaviral polypeptide under control of an arenavirus 3′ UTR) is introduced to (or infects) a population of cells is higher as compared to the proportion of cells that express the heterologous non-arenaviral polypeptide or the second heterologous non-arenaviral polypeptide after an arenavirus expressing the same heterologous non-arenaviral polypeptide under control of an arenavirus 5′ UTR and/or expressing the same second heterologous non-arenaviral polypeptide under control of an arenavirus 5′ UTR is introduced to (or infects) a population of cells. In certain embodiments, at least about, or about 1%, 2%, 3%, 4%, 5%, 6%, 7%, 8%, 9%, 10%, 15%, 20%, 25%, 30%, 35%, 40%, 45%, 50%, 55%, 60%, 65%, 70%, 75%, 80%, 85%, 90%, 95%, 99%, or 100% more cells express the heterologous non-arenaviral polypeptide and/or express the second heterologous non-arenaviral polypeptide after an arenavirus of the present disclosure (e.g., expressing the heterologous non-arenaviral polypeptide under control of an arenavirus 3′ UTR and/or expressing the second heterologous non-arenaviral polypeptide under control of an arenavirus 3′ UTR) is introduced to (or infects) a population of cells as compared to the proportion (or amount) of cells that express the heterologous non-arenaviral polypeptides and/or express the second heterologous non-arenaviral polypeptides after an arenavirus expressing the same heterologous non-arenaviral polypeptide under control of an arenavirus 5′ UTR and/or expressing the same second heterologous non-arenaviral polypeptide under control of an arenavirus 5′ UTR is introduced to (or infects) a comparable population of cells. In certain embodiments, the cells are from a biological sample from a subject. In certain embodiments, the biological sample is from an organ (e.g., spleen). In certain embodiments, the biological sample is a blood sample.

[0573] In certain embodiments, the arenavirus particle expresses two heterologous non-arenaviral polypeptides. In certain embodiments, expression of one heterologous non-arenaviral polypeptide is under control of an arenavirus 3′ UTR and expression of the other heterologous non-arenaviral polypeptide is under control of an arenavirus 5′ UTR. In certain embodiments, the expression of a first of the two heterologous non-arenaviral polypeptides is under control of an arenavirus 3′ UTR in a first S segment and the expression of a second of the two heterologous non-arenaviral polypeptides is under control of an arenavirus 5′ UTR in a second S segment. In certain embodiments, the expression of one heterologous non-arenaviral polypeptide is under control of an arenavirus 3′ UTR in one S segment and the expression of the other heterologous non-arenaviral polypeptide is under control of an arenavirus 5′ UTR in the other S segment. In certain embodiments, the expression of a first of the two heterologous non-arenaviral polypeptides is under control of an arenavirus 5′ UTR in a first S segment and the expression of a second of the two heterologous non-arenaviral polypeptides is under control of an arenavirus 3′ UTR in a second S segment. In certain embodiments, the expression of one heterologous non-arenaviral polypeptide is under control of an arenavirus 5′ UTR in one S segment and the expression of the other heterologous non-arenaviral polypeptide is under control of an arenavirus 3′ UTR in the other S segment. In certain embodiments, cells that are infected with the arenavirus particle of the present disclosure (e.g., expressing one heterologous non-arenaviral polypeptide under control of an arenavirus 3′ UTR in one S segment and expressing another heterologous non-arenaviral polypeptide under control of an arenavirus 5′ UTR in another S segment) express (co-express) both heterologous non-arenaviral polypeptides. In certain embodiments, the combined expression level of the two heterologous non-arenaviral polypeptides (e.g., cells expressing both heterologous non-arenaviral polypeptides) is at least about 1%, 2%, 3%, 4%, 5%, 6%, 7%, 8%, 9%, 10%, 15%, 20%, 30%, 40%, 50%, 60%, 70%, 80%, 90%, 100%, 1.5-fold, 2-fold, 3-fold, 4-fold, 5-fold, 6-fold, 7-fold, 8-fold, 9-fold, 10-fold, 12-fold, 15-fold, 18-fold, 20-fold, 25-fold, or 30-fold higher than the combined expression level of the same two heterologous non-arenaviral polypeptides expressed under control of arenavirus 5′ UTRs (e.g., expression of one heterologous non-arenaviral polypeptide is under control of an arenavirus 5′ UTR of one S segment and expression of the other heterologous non-arenaviral polypeptide is under control of an arenavirus 5′ UTR of the other S segment). In certain embodiments, the combined expression level of the two heterologous non-arenaviral polypeptides (e.g., cells expressing both heterologous non-arenaviral polypeptides) is about 1%, 2%, 3%, 4%, 5%, 6%, 7%, 8%, 9%, 10%, 15%, 20%, 30%, 40%, 50%, 60%, 70%, 80%, 90%, 100%, 1.5-fold, 2-fold, 3-fold, 4-fold, 5-fold, 6-fold, 7-fold, 8-fold, 9-fold, 10-fold, 12-fold, 15-fold, 18-fold, 20-fold, 25-fold, or 30-fold higher than the combined expression level of the same two heterologous non-arenaviral polypeptides expressed under control of arenavirus 5′ UTRs (e.g., expression of one heterologous non-arenaviral polypeptide under control of an arenavirus 5′ UTR of one S segment and expression of the other heterologous non-arenaviral polypeptide under control of an arenavirus 5′ UTR of the other S segment). In certain embodiments, the combined expression level of the two heterologous non-arenaviral polypeptides (e.g., cells expressing both heterologous non-arenaviral polypeptides) is 1%, 2%, 3%, 4%, 5%, 6%, 7%, 8%, 9%, 10%, 15%, 20%, 30%, 40%, 50%, 60%, 70%, 80%, 90%, 100%, 1.5-fold, 2-fold, 3-fold, 4-fold, 5-fold, 6-fold, 7-fold, 8-fold, 9-fold, 10-fold, 12-fold, 15-fold, 18-fold, 20-fold, 25-fold, or 30-fold higher than the combined expression level of the same two heterologous non-arenaviral polypeptides expressed under control of arenavirus 5′ UTRs (e.g., expression of one heterologous non-arenaviral polypeptide under control of an arenavirus 5′ UTR of one S segment and expression of the other heterologous non-arenaviral polypeptide under control of an arenavirus 5′ UTR of the other S segment). In certain embodiments, at least about, or about, 5%, 10%, 15%, 20%, 25%, 30%, 35%, 40%, 45%, 50%, 55%, 60%, 65%, 70%, 75%, 80%, 85%, 90%, 95%, 99%, or 100% of cells express (co-express) the two heterologous non-arenaviral polypeptides after an arenavirus of the present disclosure (e.g., expressing one heterologous non-arenaviral polypeptide under control of an arenavirus 3′ UTR in one S segment and expressing another heterologous non-arenaviral polypeptide under control of an arenavirus 5′ UTR in another S segment) is introduced to (or infects) the cells (e.g., to a population of cells). In certain embodiments, the proportion (or amount) of cells that express (co-express) the two heterologous non-arenaviral polypeptides after an arenavirus of the present disclosure (e.g., expressing one heterologous non-arenaviral polypeptide under control of an arenavirus 3′ UTR in one S segment and expressing another heterologous non-arenaviral polypeptide under control of an arenavirus 5′ UTR in another S segment) is introduced to (or infects) a population of cells is higher as compared to the proportion (or amount) of cells that express (co-express) the two heterologous non-arenaviral polypeptides after an arenavirus expressing the same two heterologous non-arenaviral polypeptides under control of arenavirus 5′ UTRs (e.g., one heterologous non-arenaviral polypeptide expressed under control of an arenavirus 5′ UTR of one S segment and the other heterologous non-arenaviral polypeptide expressed under control of an arenavirus 5′ UTR of the other S segment) is introduced to (or infects) a population of cells. In certain embodiments, at least about 1%, 2%, 3%, 4%, 5%, 6%, 7%, 8%, 9%, 10%, 15%, 20%, 25%, 30%, 35%, 40%, 45%, 50%, 55%, 60%, 65%, 70%, 75%, 80%, 85%, 90%, 95%, 99%, or 100% more cells express (co-express) the two heterologous non-arenaviral polypeptides after an arenavirus of the present disclosure (e.g., expressing one heterologous non-arenaviral polypeptide under control of an arenavirus 3′ UTR in one S segment and expressing another heterologous non-arenaviral polypeptide under control of an arenavirus 5′ UTR in another S segment) is introduced to (or infects) a population of cells as compared to the proportion (or amount) of cells that express (co-express) the two heterologous non-arenaviral polypeptides after an arenavirus expressing the same two heterologous non-arenaviral polypeptides under control of arenavirus 5′ UTRs (e.g., expressing one heterologous non-arenaviral polypeptide under control of an arenavirus 5′ UTR of one S segment and expressing the other heterologous non-arenaviral polypeptide under control of an arenavirus 5′ UTR of the other S segment) is introduced to (or infects) a comparable population of cells. In certain embodiments, the cells are from a biological sample from a subject. In certain embodiments, the biological sample is from an organ (e.g., spleen). In certain embodiments, the biological sample is a blood sample.

[0574] In certain embodiments, the arenavirus particle provided herein may show good growth in cell culture, enabling the arenavirus particle's production to high titers in industrial fermentation processes (production yields). In certain embodiments, the good growth in cell culture may be demonstrated using the assays described in this Section and in Section 6.

[0575] In certain embodiments, the titer of the arenavirus particle is at least about 1%, 2%, 3%, 4%, 5%, 6%, 7%, 8%, 9%, 10%, 15%, 20%, 30%, 40%, 50%, 60%, 70%, 80%, 90%, 100%, 1.5-fold, 2-fold, 3-fold, 4-fold, 5-fold, 6-fold, 7-fold, 8-fold, 9-fold, 10-fold, 12-fold, 15-fold, 18-fold, 20-fold, 25-fold, or 30-fold lower during a persistent infection in AGRAG mice than the titer of the respective wild-type parental arenavirus particle. In certain embodiments, the titer of the arenavirus particle is about 1%, 2%, 3%, 4%, 5%, 6%, 7%, 8%, 9%, 10%, 15%, 20%, 30%, 40%, 50%, 60%, 70%, 80%, 90%, 100%, 1.5-fold, 2-fold, 3-fold, 4-fold, 5-fold, 6-fold, 7-fold, 8-fold, 9-fold, 10-fold, 12-fold, 15-fold, 18-fold, 20-fold, 25-fold, or 30-fold lower during a persistent infection in AGRAG mice than the titer of the respective wild-type parental arenavirus particle. In certain embodiments, the titer of the arenavirus particle is 1%, 2%, 3%, 4%, 5%, 6%, 7%, 8%, 9%, 10%, 15%, 20%, 30%, 40%, 50%, 60%, 70%, 80%, 90%, 100%, 1.5-fold, 2-fold, 3-fold, 4-fold, 5-fold, 6-fold, 7-fold, 8-fold, 9-fold, 10-fold, 12-fold, 15-fold, 18-fold, 20-fold, 25-fold, or 30-fold lower during a persistent infection in AGRAG mice than the titer of the respective wild-type parental arenavirus particle. In certain embodiments, a persistent infection may be an infection that lasts at least 5 days, 10 days, 14 days, 20 days, 25 days, 30 days, 35 days, 40 days, 45 days, 50 days, 53 days, 55 days, 60 days, 65 days, 70 days, 75 days, 78 days, 80 days, 90 days, or 100 days. In certain embodiments, a persistent infection may be an infection that lasts 5 days, 10 days, 14 days, 20 days, 25 days, 30 days, 35 days, 40 days, 45 days, 50 days, 53 days, 55 days, 60 days, 65 days, 70 days, 75 days, 78 days, 80 days, 90 days, or 100 days.

### 5.13.1 Arenavirus Detection Assays

[0576] The skilled artesian could detect an arenavirus genomic or antigenomic segment or tri-segmented arenavirus particle, as described herein using techniques known in the art. For example, RT-PCR can be used with primers that are specific to a genetically engineered arenavirus segment to detect and quantify an arenavirus genomic or antigenomic segment as described herein in section 5.6. Western blot, ELISA, radioimmunoassay, immunoprecipitation, or immunocytochemistry in conjunction with flow cytometry can be used to quantify the gene products of the arenavirus genomic or antigenomic segment or tri-segmented arenavirus particle.

### 5.13.2 Assay to Measure Infectivity

[0577] Any assay known to the skilled artisan can be used for measuring the infectivity of an arenavirus vector preparation. For example, determination of the virus/vector titer can be done by a “focus forming unit assay” (FFU assay). In brief, complementing cells are plated and inoculated with different dilutions of a virus/vector sample. For determination of replication-deficient arenavirus vector titers, complementing (e.g. glycoprotein-expressing cells in the case of glycoprotein-deficient arenavirus vectors) BHK-21 of HEK293 cells are used. For replication-competent vectors e.g., MC57, 3T3 or VERO cells are common cell substrates. After an incubation period, to allow cells to form a monolayer and virus to attach to cells, the monolayer is covered with Methylcellulose. When the plates are further incubated, the original infected cells release viral progeny. Due to the Methylcellulose overlay the spread of the new viruses is restricted to neighboring cells. Consequently, each infectious particle produces a circular zone of infected cells called a Focus. Such Foci can be made visible and by that countable using antibodies against the respective arenavirus' NP or another protein expressed by the arenavirus particle or the tri-segmented arenavirus particle and a HRP-based color reaction. The titer of a virus/vector can be calculated in focus-forming units per milliliter (FFU/mL).

### 5.13.3 Growth of an Arenavirus Particle

[0578] Growth of an arenavirus particle described herein can be assessed by any method known in the art or described herein (e.g., cell culture). Viral growth may be performed by inoculating serial dilutions of an arenavirus particle described herein into cell cultures (e.g., Vero cells or BHK-21 cells or complementing versions thereof in case of replication-deficient vectors). After incubation of the virus for a specified time, the supernatant containing virus is collected and virions can be purified using standard methods.

### 5.13.4 Serum ELISA

[0579] Determination of the humoral immune response upon vaccination or immunotherapy of animals (e.g., mice, guinea pigs) can be done by antigen-specific serum ELISA's (enzyme-linked immunosorbent assays). In brief, plates are coated with antigen (e.g., recombinant protein), blocked to avoid unspecific binding of antibodies and incubated with serial dilutions of sera. After incubation, bound serum-antibodies can be detected, e.g., using an enzyme-coupled anti-species (e.g., mouse, guinea pig)-specific antibody (detecting total IgG or IgG subclasses) and subsequent color reaction. Antibody titers can be determined as, e.g., endpoint geometric mean titer.

### 5.13.5 Assay to Measure the Neutralizing Activity of Induced Antibodies

[0580] Determination of the neutralizing antibodies in sera can be performed by plaque reduction neutralization tests. Depending on the viral target, suitable cells are used, such as ARPE-19 cells from ATCC for testing cytomegalovirus-neutralizing antibodies and a GFP-tagged virus (for example, cytomegalovirus) as test article. In addition, supplemental guinea pig serum as a source of exogenous complement may be used. The assay is started with seeding of 6.5×10³ cells/well (50 μl/well) in a 384 well plate one or two days before using for neutralization. The neutralization is performed by mixing of a defined virus inoculum in 96-well sterile tissue culture plates without cells but with titrated concentrations of test serum for 1 hour at 37° C. After the neutralization incubation step the mixture is added to the cells and incubated for additional 4 days for GFP-detection with a plate reader. Alternatively, instead of GFP or similar reporters, a viral structural protein can be detected as described in section 5.13.2. A positive neutralizing human sera is used as assay positive control on each plate to check the reliability of all results. Titers (EC50) are determined using a 4 parameter logistic curve fitting. As additional testing the wells are checked with a fluorescence microscope.

### 5.13.6 LCMV Plaque Reduction Neutralization Test

[0581] In brief, plaque reduction (neutralization) assays for LCMV can be performed by use of a replication-competent or -deficient LCMV that is tagged with green fluorescent protein, 5% rabbit serum may be used as a source of exogenous complement, and plaques can be enumerated by fluorescence microscopy. Neutralization titers may be defined as the highest dilution of serum that results in a 50%, 75%, 90% or 95% reduction in plaques, compared with that in control (pre-immune) serum samples.

5.13.7 Determination of LCMV genome copies

[0582] qPCR LCMV RNA genomes are isolated using QIAamp Viral RNA mini Kit (QIAGEN), according to the protocol provided by the manufacturer. LCMV RNA genome equivalents are detected by quantitative PCR carried out on an StepOnePlus Real Time PCR System (Applied Biosystems) with SuperScript® III Platinum® One-Step qRT-PCR Kit (Invitrogen) and primers and probes (FAM reporter and NFQ-MGB Quencher) specific for part of the LCMV NP coding region or another genomic stretch of the arenavirus particle or the tri-segmented arenavirus particle. The temperature profile of the reaction may be: 30 min at 60° C., 2 min at 95° C., followed by 45 cycles of 15 s at 95° C., 30 s at 56° C. RNA can be quantified by comparison of the sample results to a standard curve prepared from a log 10 dilution series of a spectrophotometrically quantified, in vitro-transcribed RNA fragment, corresponding to a fragment of the LCMV NP coding sequence or another genomic stretch of the arenavirus particle or the tri-segmented arenavirus particle containing the primer and probe binding sites.

### 5.13.8 Western Blotting

[0583] Infected cells grown in tissue culture flasks or in suspension are lysed at specific time points post infection using RIPA buffer (Thermo Scientific) or used directly without cell-lysis. Samples are heated to 99° C. for 10 minutes with reducing agent and NuPage LDS Sample buffer (Novex, Thermo Fisher Scientific, USA) and chilled to room temperature before loading on 4-12% SDS-gels for electrophoresis. Proteins are blotted onto membranes using Invitrogens iBlot Gel transfer Device and visualized by Ponceau staining. Finally, the preparations are probed with a primary antibody directed against proteins of interest and alkaline phosphatase conjugated secondary antibodies followed by staining with 1-Step NBT/BCIP solution (Invitrogen, USA).

### 5.13.9 MHC-Peptide Multimer Staining Assay for Detection of Antigen-Specific CD8+ T-Cells

[0584] Any assay known to the skilled artisan can be used to test antigen-specific CD8+ T-cell responses. For example, the MHC-peptide tetramer staining assay can be used (see, e.g., Altman J. D. et al., Science. 1996; 274:94-96; and Murali-Krishna K. et al., Immunity. 1998; 8:177-187). Briefly, the assay comprises the following steps, a tetramer assay is used to detect the presence of antigen specific T-cells. In order for a T-cell to detect the peptide to which it is specific, it must both recognize the peptide and the tetramer of MHC molecules custom made for a defined antigen specificity and MHC haplotype of T-cells (typically fluorescently labeled). The tetramer is then detected by flow cytometry via the fluorescent label.

### 5.13.10 ELISPOT Assay for Detection of Antigen-Specific T-Cells.

[0585] Any assay known to the skilled artisan can be used to test antigen-specific T-cell responses (CD4+ and CD8+). For example, the ELISPOT assay can be used (see, e.g., Czerkinsky C. C. et al., J Immunol Methods. 1983; 65:109-121; and Hutchings P. R. et al., J Immunol Methods. 1989; 120:1-8). Briefly, the assay comprises the following steps: An immunospot plate is coated with an anti-cytokine antibody. Cells are incubated in the immunospot plate in the presence of specific stimulus e.g. peptides against which reactivity is to be tested. Cells secrete cytokines and are then washed off. Plates are then coated with a second biotyinlated-anticytokine antibody and cytokine secretion spots are visualized with an avidin-HRP system.

### 5.13.11 Intracellular Cytokine Assay for Detection of Functionality of CD8+ and CD4+ T-Cell Responses.

[0586] Any assay known to the skilled artisan can be used to test the functionality of CD8+ and CD4+ T cell responses. For example, the intracellular cytokine assay combined with flow cytometry can be used (see, e.g., Suni M. A. et al., J Immunol Methods. 1998; 212:89-98; Nomura L. E. et al., Cytometry. 2000; 40:60-68; and Ghanekar S. A. et al., Clinical and Diagnostic Laboratory Immunology. 2001; 8:628-63). Briefly, the assay comprises the following steps: activation of cells via specific peptides or protein, an inhibition of protein transport (e.g., brefeldin A) is added to retain the cytokines within the cell. After a defined period of incubation, typically 5 hours, a washing steps follows, and antibodies to other cellular markers can be added to the cells. Cells are then fixed and permeabilized. The flurochrome-conjugated anti-cytokine antibodies are added and the cells can be analyzed by flow cytometry.

### 5.13.12 Assay for Confirming Replication-Deficiency of Viral Vectors

[0587] Any assay known to the skilled artisan that determines concentration of infectious and replication-competent virus particles can also be used as a to measure replication-deficient viral particles in a sample. For example, FFU assays with non-complementing cells can be used for this purpose.

[0588] Furthermore, plaque-based assays are a standard method used to determine virus concentration in terms of plaque forming units (PFU) in a virus sample. Specifically, a confluent monolayer of non-complementing host cells is infected with the virus at varying dilutions and covered with a semi-solid medium, such as agar to prevent the virus infection from spreading indiscriminately. A viral plaque is formed when a virus successfully infects and replicates itself in a cell within the fixed cell monolayer, and spreads to surrounding cells (see, e.g., Kaufmann, S. H.; Kabelitz, D. (2002). Methods in Microbiology Vol. 32: Immunology of Infection. Academic Press. ISBN 0-12-521532-0), and thereby exerts a cytopathic or lytic effect. Plaque formation can take 2-14 days, depending on the virus being analyzed. Plaques are generally counted manually and the results, in combination with the dilution factor used to prepare the plate, are used to calculate the number of plaque forming units per sample unit volume (PFU/mL). The PFU/mL result represents the number of infective replication-competent particles within the sample. When C-cells are used, the same assay can be used to titrate replication-deficient arenavirus particles or tri-segmented arenavirus particles.

5.13.13 Assay for Expression of Viral Antigens Including Transgenically Inserted Non-Arenaviral Polypeptides Expressed from Viral Vectors

[0589] Any assay known to the skilled artisan can be used for measuring expression of viral antigens and transgenically inserted non-arenaviral polypeptides expressed from viral vectors. For example, FFU assays can be performed. For detection, mono- or polyclonal antibody preparation(s) against the respective viral antigens are used (transgene-specific FFU). Methods to determine the binding of specific antibodies to proteins expressed by the replication-competent or -deficient virus (viral structural proteins, viral non-structural proteins and transgenically inserted non-arenaviral polypeptides) comprise flow cytometry, immunocytochemistry, Immunofluorescence, Western Blot or dot blot. Fluorescent reporter proteins can be visualized by direct fluorescence microscopy or flow cytometry.

### 5.13.14 Animal Models

[0590] To investigate recombination and infectivity of an arenavirus particle described herein in vivo animal models can be used. In certain embodiments, the animal models that can be used to investigate recombination and infectivity of a tri-segmented arenavirus particle include mouse, guinea pig, rabbit, and monkeys. In a preferred embodiment, the animal models that can be used to investigate recombination and infectivity of an arenavirus include mouse. In a more specific embodiment, the mice, which can be used to investigate recombination and infectivity of an arenavirus particle, are triple-deficient for type I interferon receptor, type II interferon receptor and recombination activating gene 1 (RAG1).

[0591] In certain embodiments, the animal models can be used to determine arenavirus infectivity and transgene stability. In some embodiments, viral RNA can be isolated from the serum of the animal. Techniques are readily known by those skilled in the art. The viral RNA can be reverse transcribed and the cDNA carrying the arenavirus ORFs can be PCR-amplified with gene-specific primers. Flow cytometry can also be used to investigate arenavirus infectivity and transgene expression.

### 6. EXAMPLES

[0592] 6.1 Split-C and Split-E but not Split-A or Split-F Vectors Grow to High Titers Equivalent to artLCMV, Revealing a Key Role of SP Positioning for Vector Growth

[0593] The positioning of GP SP and GP1/GP2, respectively, in the genome arrangements of Split-B and Split-D viruses and their X and Y variants is predicted to enable inter-segmental recombination and reversion to a wild-type-like virus, in a process analogous to the one outlined for r3LCMV in FIG. 1F: One recombination event with a break point at the end of GP SP in one S segment and immediately upstream of GP1 in the other S segment is predicted to yield a bi-segmented wild-type virus. As such, the Split-B and Split-D designs were not considered for experimental testing and validation.

[0594] Accordingly, LCMV-based Split-A, Split-C, Split-E and Split-F viruses, each of them carrying two transgenic ORFs, were generated and their cell culture growth properties were analyzed. For this experiment, the murine polymerase-I-/polymerase-II-based arenavirus rescue system as published by Flatz et al. and Kallert et al. (FIG. 5) (Flatz L, et al. Proc Natl Acad Sci USA 2006; 103, 4663-4668; Kallert S M, et al. Nat Commun 2007; 8, 15327) was used. Plasmids for intracellular polymerase-I-driven expression of the newly designed S segments of the respective Split-A, Split-E and Split-F viruses (pol-I-S1, pol-I-S2, see schematic at right of FIG. 6A) were assembled by a commercial vendor based on synthetic DNA, which was ligated into existing expression cassettes (Flatz L, et al. Proc Natl Acad Sci USA 2006; 103, 4663-4668; Kallert S M, et al. Nat Commun 2007; 8, 15327). BHK-21 cells stably expressing the LCMV glycoprotein (Flatz L, et al. Nat Med 2010; 16, 339-345) were transfected with a combination of plasmids consisting of i) polymerase-I-based expression plasmid encoding for a wildtype LCMV L segment (pol-I-L), ii) polymerase-I-based expression plasmids encoding for the respective viruses' S1 and S2 segments (Pol-I-S1, Pol-I-S2) and polymerase-II-driven expression plasmids for the viral trans-acting factors L and NP (pC-L, pC-NP, FIG. 5). Six days after transfection, infectious titers of tri-segmented viruses were determined by immunofocus formation assay (IFF) on non-complementing 3T3 cells (Battegay M, et al. J Virol Methods 1991; 33, 191-198). The Split-E virus reached a titer >10e6 focus-forming units (PFU, FFU) per ml, whereas titers of Split-A and Split-F viruses remained below 10e5 FFU/ml (FIG. 6A). In a separate analogous experiment, side-by-side Split-C and artLCMV viruses were generated to express one GFP and one Tomato (TOM, red fluorescent protein) transgene each (see schematic at the right of FIG. 6B). Both viruses reached comparable titers close to 10e6 FFU/ml on day 6 after plasmid transfection. To determine virus growth upon infection on non-complementing BHK-21 cells (devoid of a GP transgene), Split-C, Split-A and artLCMV viruses were generated to express one GFP ORF and one P1A cancer-testis self-antigen ORF each (see schematic at the right of FIG. 6C). For comparability to the SP-flanked P1A transgenes in the Split-C and Split-A viruses, the P1A ORF in r3LCMV was expressed in-frame with an upstream tissue plasminogen activator signal sequence (“sP1A”). Supernatants were harvested 48 hours after infection of the cells at multiplicity of infection (MOI) of 0.01 and viral titers were determined. The Split-C virus reached titers exceeding 10e6 FFU/ml, which was equivalent or higher than artLCMV, whereas the titer of the Split-A virus remained below 10e4 FFU/ml.

[0595] In an additional experiment 293F suspension cells were infected with either a Split-C, a Split-E or an artLCMV vector carrying genomes as schematically outlined in FIG. 6D. Supernatant was harvested to determine viral titers over time (FIG. 6D). At early time points (24 hours, and 48 hours) after infection, the Split-C and Split-E vectors reached significantly higher titers than artLCMV (p<0.01 by 1-way ANOVA with Bonferroni post-test). When titers peaked (72 hours, 96 hours, and 120 hours after infection), the titers of all three viruses were comparable (p>0.05 by 1-way ANOVA with Bonferroni post-test). Cultures infected with artLCMV vectors are known to produce not only tri-segmented particles with a genome as depicted in FIG. 6D but additionally also an excess of bi-segmented particles carrying only the S_{NP} and the L segment but not the S_{GP} segment (Kallert S M, et al. Nat Commun 2017; 8, 15327). The latter bi-segmented particles can be visualized when performing immunofocus formation assays on GP-transgenic trans-complementing 293T cells (293T-GP cells, Flatz L, et al. Nat Med 2010; 16, 339-345). The ratio between infectious titers assessed on GP-pseudotyping 293T-GP cells and the titers detectable on non-pseudotyping 3T3 cells can, therefore, be taken as a measure for the proportion of vector particles carrying all three genome segments of artLCMV or Split vectors. Such ratio was determined for the samples collected at 48h (refer to the experiment displayed in FIG. 6D). It was found that, during the logarithmic growth phase of the vectors, the ratio was significantly higher for artLCMV than for either Split-C or Split-E (FIG. 6E). This finding indicated that compared to artLCMV, Split-C and Split-E vectors were more efficient at packaging all three genomic segments, offering a likely explanation for their more rapid growth and higher output titers in the early phase of cell culture propagation (compare to FIG. 6D).

[0596] In summary, viruses with a Split-C and Split-E genome grew to high titers, equivalent to artLCMV, whereas Split-A and Split-F grew to titers >10-fold lower than the aforementioned viruses. The commonality of the Split-C and Split-E vector design, differentiating them from the poorly growing Split-A and Split-F vector design, is their positioning of the arenavirus GP SP under control of the 3′ UTR. Thus, the positioning of the segregated arenavirus GP SP under 3′ UTR control enables growth of Split-C and Split-E vectors to titers equivalent to tri-segmented arenavirus vectors such as artLCMV, rendering the Split-C and Split-E design preferable over Split-A and Split-F. Based on the positioning of GP SP under 5′ UTR control, the Split-B and Split-D vector genomes are not expected to offer favorable growth properties either.

6.2 Several-Fold Higher Levels of Transgene Expression from S1 Segment of LCMV-based Split-C virus than from the S_{GP} segment of artLCMV

[0597] Next, the amount of transgene expressed by the LCMV-based Split-C virus and the artLCMV virus carrying one GFP and one Tomato transgene each (Split-C(TOM/GFP), artLCMV(TOM/GFP); FIG. 7) were compared on a per-cell level. BHK-21 cells were infected at MOI=0.1 and GFP was visualized by fluorescence microscopy 24 hours after infection. It was found that in Split-C(TOM/GFP)-infected cells the GFP levels were visibly higher than in cells infected with artLCMV(TOM/GFP). The GFP levels of artLCMV(TOM/GFP)-infected cells were, however, also clearly above background fluorescence of uninfected control cells (“no virus” in FIG. 7).

[0598] To quantify GFP and TOM expression by the two viruses, flow cytometry from the same cells were performed 8 hours later, thus 32 hours after infection. When plotting GFP against sideward scatter (SSC, FIG. 8B), a clearly separated population of GFP-expressing cells was found, both amongst Split-C(TOM/GFP)- and artLCMV(TOM/GFP)-infected cells. Those cells were gated (see FIG. 8B for gating) for further analysis and compared to the GFP-negative population of uninfected control cells (“no virus”). A histogram analysis of GFP levels in the three gated populations confirmed the visual impression obtained by fluorescence microscopy (FIG. 8C). GFP levels in Split-C(TOM/GFP)-infected cells were approximately 7-fold higher than those in cells infected with artLCMV(TOM/GFP) (FIG. 8C), while also the latter were clearly above uninfected control background. Importantly though, the two viruses expressed virtually identical levels of TOM. This was expected given that the two viruses carry the identical TOM-expressing S2/S_{NP} segments. At the same time, this finding validated the differential levels of GFP expression from the viruses' respective S1 segment by serving as an internal reference standard for the GFP measurements. Thus, it was found that the Split-C design of tri-segmented arenaviruses enabled a several-fold (˜7-fold) higher expression of the transgene encoded in the S1 segment as compared to the S_{GP} segment of artLCMV, while transgene expression levels from the S2 segment were indistinguishable from the artLCMV design's S_{NP} segment.

6.3 Higher Proportion of Cells in Split-C-Infected Cultures Co-Express Both the SNP and SGP-Encoded Transgenes than in artLCMV-Infected Culture

[0599] The ability of Split-C and artLCMV-based vectors to co-express their respective two transgenes in cells of infected cultures was analyzed. In brief, BHK-21 cells were infected with either Split-C(TOM/GFP) or artLCMV(TOM/GFP), both expressing GFP from the S1/S_{GP} segment and TOM from the S2/S_{NP} segment. The artLCMV(GFP/TOM) vector expressing GFP from the S2/S_{NP} segment and TOM from the S1/S_{GP} segment (FIG. 8D) was also included for further comparison. An earlier report (Kallert S M, et al. Nat Commun 2017; 8, 15327) has demonstrated that only a minority of cells in artLCMV vector-infected cultures express both the S_{NP}- and S_{GP}-encoded transgenes. In agreement with the earlier report, this experiment showed that 24 hours after infection at MOI=0.1 only 13% and 19% of cells in artLCMV(TOM/GFP)- and artLCMV(GFP/TOM)-infected cultures, respectively, exhibited detectable levels of both vector transgenes (FIG. 8E). Cells expressing only the S_{NP}-encoded TOM (22%) were more abundant than GFP/TOM-coexpressing cells (13%) in artLCMV(TOM/GFP)-infected cultures (FIG. 8E). Analogously, S_{NP}-encoded GFP single-positive cells in artLCMV(GFP/TOM)-infected cultures (44%) were more frequent than GFP/TOM-coexpressing cells (19%) (FIG. 8E). In remarkable contrast, approximately half of the cells in Split-C(TOM/GFP)-infected cultures expressed detectable levels of both, TOM and GFP, thus exceeding the subset of cells expressing only either GFP (39%) or TOM (4%) (FIG. 8E).

6.4 Stable Attenuation of Split-C Virus Even after Prolonged Periods of Replication in Highly Immunodeficient Mice

[0600] To test whether the Split-C design allowed for stable attenuation, infection experiments were performed in highly immunodeficient AGRAG mice, which lack not only T and B cells owing to RAG1-deficiency but also are homozygous for disrupted type I interferon receptor and the type II interferon receptor genes. A second group of AGRAG mice was infected with a GFP-expressing r3LCMV, which was known to be genetically unstable owing to its ability to undergo inter-segmental recombination (FIG. 1F; Kallert S M, et al. Nat Commun 2017; 8, 15327). A third group of mice was infected with virulent bi-segmented LCMV control virus (LCMVwt). Viremia over time was detected by determining NP-expressing FFU in blood, reflective of the total LCMV infectivity and thus of the replicative capacity and virulence of the three viruses (FIG. 9A). On day 14 after infection, both the Split-C- and r3LCMV-infected mice exhibited substantially lower viral loads than animals infected with virulent bi-segmented LCMVwt. Around day 35 after infection, however, viremia in r3LCMV-infected mice augmented continuously and by day 53 reached levels comparable to LCMVwt-infected animals. This continuous increase in viral loads of r3LCMV-infected mice has previously been shown to result from inter-segmental recombination and reversion to a bi-segmented viral genome (compare FIG. 1F; (Kallert S M, et al. Nat Commun 2017; 8, 15327). In stark contrast, viremia in Split-C-infected mice remained consistently lower than LCMVwt throughout the observation period of 78 days, attesting to the vector's stably attenuated phenotype. GFP-expressing FFU was determined as a measure of transgene-expressing viruses (FIG. 9B). The ratio of total viral infectivity (as determined by NP FFU) and GFP-expressing infectivity (FIG. 9C) was then calculated. For r3LCMV-infected mice this ratio increased dramatically over time, indicating that by day 78 the total number of infectious particles outnumbered transgene-expressing particles by >70-fold. In contrast, this ratio remained substantially lower in Split-C-infected mice.

[0601] A second independent infection experiment in AGRAG mice was performed to further test and compare genetic stability. In addition to the three experimental groups included in the experiment to FIGS. 9A-9C, a fourth group of mice was infected with GFP-expressing artLCMV, which was known to be genetically stable (FIG. 1G; Kallert S M, et al. Nat Commun 2017; 8, 15327). Viremia over time was detected by determining NP-expressing FFU in blood, reflective of the total LCMV infectivity and thus of the replicative capacity and virulence of the four viruses (FIG. 9D). On day 7 and 21 after infection, Split-C-, artLCMV- and r3LCMV-infected mice exhibited substantially lower viral loads than animals infected with virulent bi-segmented LCMVwt. Between day 21 and day 42 after infection, however, viremia in r3LCMV-infected mice increased substantially and from day 42 onwards remained at a plateau comparable to LCMVwt-infected animals. This increase in viral loads of r3LCMV-infected mice has previously been shown to result from inter-segmental recombination and reversion to a bi-segmented viral genome (compare FIG. 1F; (Kallert S M, et al. Nat Commun 2017; 8, 15327). In stark contrast, viremia in Split-C- and artLCMV-infected mice remained consistently lower than LCMVwt throughout the observation period of 136 days, attesting to the Split-C vector's stably attenuated phenotype. GFP-expressing FFU was determined as a measure of transgene-expressing viruses (FIG. 9E) and the ratio of total viral infectivity (as determined by NP FFU) and GFP-expressing infectivity was calculated (FIG. 9F). For r3LCMV-infected mice this ratio increased dramatically over time, indicating that by day 136 the total number of infectious particles outnumbered on average the transgene-expressing particles by >600-fold. In contrast, the corresponding average ratios in Split-C- and artLCMV-infected mice remained <10.

[0602] These data demonstrated that the segregation of GP SP from GP1/GP2 in the design of tri-segmented arenavirus genomes as exemplified here by the Split-C design, allowed for stable attenuation even after prolonged periods of replication in highly immunodeficient mice.

6.5 Transgene Delivery on the S1 Segment of an LCMV-Based Split-C Vector Results in Higher Immunogenicity than its Expression from the S_{GP} Segment of an artLCMV Vector

[0603] Given that transgene expression levels from the S1 segment of an LCMV-based Split-C virus were approximately 7-fold higher than from the corresponding S_{GP} segment of artLCMV (FIG. 7 and FIGS. 8A-8E), the level of immunogenicity was then evaluated to see if there was a correlation between the transgene expression level and the immunogenicity. First, CD8+ T cell responses to a P1A transgene expressed from the S1 segment of an LCMV-based Split-C virus (Split-C(P1A/GFP)) was assessed and compared to the immunogenicity of an artLCMV vector delivering in its S_{GP} segment the P1A ORF fused to an upstream tissue plasminogen activator signal sequence (“sP1A”, artLCMV(GFP/sP1A)). Thereby, both P1A translation products were ER-inserted, which can augment immunogenicity (Malin A S, et al. Microbes Infect 2000; 2, 1677-1685). The two vectors' genomes both carried a GFP transgene on their identical S2 and S_{NP} segments, respectively (FIG. 10A). On day 9 after immunization, P1A epitope-specific CD8+ T cell frequencies in blood were determined by flow cytometry using MHC class I tetramers. Mean P1A-specific CD8+ T cell frequencies in Split-C(P1A/GFP)-immunized mice were 2.8-fold higher than in controls immunized with artLCMV(GFP/sP1A), and this difference was statistically significant (FIG. 10B, p<0.01 by unpaired two-tailed student's 1-test). In contrast, CD8+ T cell responses to the two vector's common backbone epitope NP118 were not significantly different between the two groups of animals (p>0.05, FIG. 10C). The ratio between P1A epitope-specific and vector backbone-specific CD8+ T cell responses (P1A: NP118 ratio, FIG. 10D) was again significantly different between the two vectors (p<0.01). These results with P1A-expressing vectors demonstrated that the Split-C design of an LCMV vector elicited higher immunogenicity of the transgene encoded in its S1 segment than the responses elicited by a transgene encoded in the S_{GP} segment of artLCMV. Thereby, the Split-C design shifted immunodominance towards transgene-specific responses and away from vector backbone epitopes.

[0604] To confirm and extend these observations, CD8+ T cell responses of C57BL6 mice to a non-oncogenic fusion antigen (E7E6) comprising the HPV16 E7 and E6 proteins (Cassetti et al. Vaccine 2004; 3-4, 520-527) were studied. Split-C- and artLCMV-based vectors expressing E7E6 from their respective S1/S_{GP} segments, in conjunction with a GFP transgene on their identical S2/S_{NP} segments were engineered (FIG. 11A). When assessing the acute effector response from blood on day 8 after immunization, the Split-C vector induced significantly higher frequencies of E7-specific CD8+ T cells than the artLCMV vector (FIG. 11B). In contrast, CD8+ T cell responses to the immunodominant LCMV nucleoprotein backbone-derived epitope NP396 were of higher frequency in artLCMV-immunized mice (FIG. 11C). These differences translated into a higher and thus more favorable immunodominance ratio of E7 transgene:NP396 backbone responses in Split-C- as compared to artLCMV-immunized mice (FIG. 11D). CD8+ T cell memory was assessed on day 22 after immunization from the spleen of the same animals. In parallel to the acute effector response, Split-C-immunized mice exhibited higher frequencies of E7-specific CD8+ T cells (FIG. 11E) but lower frequencies of NP396-specific CD8+ T cells (FIG. 11F) than artLCMV-immunized mice. These differences translated again into a higher E7:NP396 epitope dominance ratio in Split-C-vaccinated animals (FIG. 11G). Also in terms of absolute cell counts, E7-specific CD8+ T cells of Split-C-immunized mice exceeded those of artLCMV-immunized animals (FIG. 11H) while NP396-specific CD8+ T cells were higher in the artLCMV-vaccinated group (FIG. 11I). When studying the subset distribution of the vector-induced CD8+ T cell response, it was noted that Split-C-immunized mice harboured significantly higher numbers of E7-specific CD62L^{low} effector memory CD8+ T cells than artLCMV-immunized mice (FIG. 11J). Analogous differences were found for cells expressing the effector markers CX3CR1 (FIG. 11K) or KLRG1 (FIG. 11L). In contrast, E7-specific CD62L^{high} central memory CD8+ T cells (FIG. 11M) and the subset expressing the memory precursor marker CD127+ (FIG. 11N) were similarly abundant in Split-C- and artLCMV-immunized mice. Altogether these findings in C57BL/6 mice confirmed the observations in P1A-immunized BALB/c mice that Split-C vectors induce higher CD8+ T cell responses, both in frequency and absolute number, to S1-/S_{GP}-encoded transgenes than artLCMV vectors, with a concomitant shift in transgene-to-backbone epitope dominance. Furthermore, these latter results indicated that Split-C-induced CD8+ T cell responses excelled primarily in their ability to induce effector/effector-memory CD8+ T cell responses to S_{GP}-encoded transgenes, while central memory responses were comparable in magnitude to artLCMV-induced ones.

### 6.6. Generation and Cell Culture Growth of Junin Candid #1-Based Split-C Vectors

[0605] Split-C vectors based on the Junin virus vaccine strain Candid #1 were generated (Split-C-CAND), each of them carrying two transgenic ORFs, and their cell culture growth properties were analyzed. For this experiment, the murine polymerase-I-/polymerase-II-based arenavirus rescue system as published by Flatz et al. and Kallert et al. (FIG. 5) (Flatz L, et al. Proc Natl Acad Sci USA 2006; 103, 4663-4668; Kallert S M, et al. Nat Commun 2007; 8, 15327) was used. Plasmids for intracellular polymerase-I-driven expression of the newly designed S segments of the respective Split-C-CAND (pol-I-S1, pol-I-S2; for intracellular expression of the S1 and S2 segments depicted in FIGS. 12A-12B) were assembled based on existing expression cassettes (Flatz L, et al. Proc Natl Acad Sci USA 2006; 103, 4663-4668; Kallert S M, et al. Nat Commun 2007; 8, 15327). BHK-21 cells stably expressing the LCMV glycoprotein (Flatz L, et al. Nat Med 2010; 16, 339-345) were transfected with a combination of plasmids consisting of i) polymerase-I-based expression plasmid encoding for a wildtype Candid #1 L segment (pol-I-L), ii) polymerase-I-based expression plasmids encoding for the respective viruses' S1 and S2 segments (Pol-I-S1, Pol-I-S2) and polymerase-II-driven expression plasmids for the Candid #1 trans-acting factors L and NP (pC-L, pC-NP, FIG. 5). Five days after transfection, transfection culture supernatants were blindly passaged on 293T cells (devoid of transgenic GP expression). Supernatants from this blind passage were collected 2, 7 and 9 days later and infectious, replication-competent titers of tri-segmented Split-C-CAND(TOM/GFP) and Split-C-CAND(TOM/E7E6) were determined by immunofocus formation assay (IFF) on non-complementing 3T3 cells (Battegay M, et al. J Virol Methods 1991; 33, 191-198) using a Junin virus nucleoprotein-specific antibody for detection. On day 7, both Split-C-CAND(TOM/GFP) and Split-C-CAND(TOM/E7E6) vectors reached peak titers >1′000′000 FFU/ml, documenting that not only Old World arenaviruses such as LCMV but also New World arenaviruses such as Junin Candid #1 can be converted into replication-competent vectors based on the Split-C design.

6.7 Higher Levels of Transgene Expression from S1 Segment of CAND-Based Split-C Virus than from the SGP Segment of artCAND

[0606] Next, the amount of transgene expressed by the CAND-based Split-C virus and a comparator artCAND virus carrying one GFP and one Tomato transgene each (Split-C-CAND(TOM/GFP), artCAND(TOM/GFP); FIG. 13A) were compared on a per-cell level. 293T cells were infected at MOI=0.1 with either one of the aforementioned viruses or were left uninfected (“no virus”). GFP as well as TOM expression was quantified by flow cytometry 72 hours later (FIGS. 13B-13D). A comparable proportion of GFP/TOM coexpressing population of cells was observed in Split-C-CAND(TOM/GFP)- and artCAND(TOM/GFP-infected cell cultures (FIG. 13B). When plotting GFP against sideward scatter (SSC, FIG. 13C), a clearly separated population of GFP-expressing cells was found, both amongst Split-C-CAND(TOM/GFP)- and amongst artCAND(TOM/GFP)-infected cells, but the GFP mean fluorescence intensity (MFI) of Split-C-CAND(TOM/GFP)-infected cells was approximately 2-fold higher than of artCAND(TOM/GFP)-infected cells. Importantly though, the two viruses expressed virtually identical levels of TOM (FIG. 13D). This was expected given that the two viruses carry the identical TOM-expressing S2/S_{NP} segments. At the same time, this finding validated the differential levels of GFP expression from the viruses' respective S1/S_{GP} segment by serving as an internal reference standard for the GFP measurements. Thus, it was found that the Split-C design of tri-segmented Candid #1 enabled a ˜2-fold higher expression of the transgene encoded in the S1 segment as compared to the S_{GP} segment of artCAND, while transgene expression levels from the S2 segment were indistinguishable from the artCAND design's S_{NP} segment.

6.8 Transgene Delivery on the S1 Segment of a CAND-Based Split-C Vector Results in Higher Immunogenicity than its Expression from the SGP Segment of an artCAND vector

[0607] Given that transgene expression levels from the S1 segment of a CAND-based Split-C virus were approximately 2-fold higher than from the corresponding S_{GP} segment of artCAND (FIG. 13C), the level of immunogenicity was then evaluated to see if there was a correlation between the transgene expression level and the immunogenicity. CD8+ T cell responses to an artificial HPV16 E7E6 fusion antigen expressed from the S1 segment of a CAND-based Split-C virus (Split-C-CAND(TOM/E7E6)) was assessed and compared to the immunogenicity of an artCAND(TOM/E7E6) vector delivering in its S_{GP} segment the E7E6 transgene (FIG. 14A). The two vectors' genomes both carried a TOM transgene on their identical S2 and S_{NP} segments, respectively (FIG. 14A). On day 9 after immunization, E7 epitope-specific CD8+ T cell frequencies in blood were determined by flow cytometry using MHC class I tetramers. Mean E7-specific CD8+ T cell frequencies in Split-C-CAND(TOM/E7E6)-immunized mice were ˜7-fold higher than in controls immunized with artCAND(TOM/E7E6), and this difference was statistically significant (FIG. 14B, p<0.01 by unpaired two-tailed student's 1-test). In contrast, CD8+ T cell responses to the two vector's common backbone epitope NP205 (YTVKYPNL; SEQ ID NO: 47) were not significantly different between the two groups of animals (p>0.05, FIG. 14C). The ratio between E7 epitope-specific and NP205 vector backbone-specific CD8+ T cell responses (E7:NP205 ratio, FIG. 14D) was also significantly different between the two vectors (p<0.01). These results with E7E6-expressing vectors demonstrated that the Split-C design of a Candid #1-based vector elicited higher immunogenicity of the transgene encoded in its S1 segment than the responses elicited by a transgene encoded in the S_{GP} segment of artCAND. Thereby, the Split-C design shifted immunodominance towards transgene-specific responses and away from vector backbone epitopes.

### 7. EQUIVALENTS

[0608] The viruses, nucleic acids, methods, host cells, and compositions disclosed herein are not to be limited in scope by the specific embodiments described herein. Indeed, various modifications of the viruses, nucleic acids, methods, host cells, and compositions in addition to those described will become apparent to those skilled in the art from the foregoing description and accompanying figures. Such modifications are intended to fall within the scope of the appended claims.

[0609] Various publications, patents and patent applications are cited herein, the disclosures of which are incorporated by reference in their entireties.

### 8. SEQUENCE LISTING

| SEQ ID | | |
|---|---|---|
| NO. | Description | Sequence |
| 1 | Amino acid sequence of | MGQIVTMFEALPHIIDEVINIVIIVLIIITSIKAVYNFATCGILAL |
| | glycoprotein precursor in | VSFLFLAGRSCGMYGLNGPDIYKGVYQFKSVEFDMSHLNLT |
| | LCMV | MPNACSANNSHHYISMGSSGLELTFTNDSILNHNFCNLTSAF |
| | | NKKTFDHTLMSIVSSLHLSIRGNSNHKAVSCDFNNGITIQYN |
| | | LSFSDPQSAISQCRTFRGRVLDMFRTAFGGKYMRSGWGWA |
| | | GSDGKTTWCSQTSYQYLIIQNRTWENHCRYAGPFGMSRILF |
| | | AQEKTKFLTRRLAGTFTWTLSDSSGVENPGGYCLTKWMIL |
| | | AAELKCFGNTAVAKCNVNHDEEFCDMLRLIDYNKAALSKF |
| | | KQDVESALHVFKTTVNSLISDQLLMRNHLRDLMGVPYCNY |
| | | SKFWYLEHAKTGETSVPKCWLVTNGSYLNETHFSDQIEQEA |
| | | DNMITEMLRKDYIKRQGSTPLALMDLLMFSTSAYLISIFLHL |
| | | VKIPTHRHIKGGSCPKPHRLTNKGICSCGAFKVPGVKTIWKR |
| | | R |
| 2 | Amino acid sequence of | MGQIITFFQEVPHVIEEVMNIVLIALSLLAILKGVYNVATCGII |
| | glycoprotein precursor in | GLVTFLFLCGRSCSLIYKGSYELQTLELNMETLNMTMPLSCT |
| | Lassa virus | KNSSHHYIRVGNETGLELTLTNTSIINHKFCNLSDAHKRNLY |
| | | DHALMSILSTFHLSIPNFNQYEAMSCDFNGGKISVQYNLSHA |
| | | YAVDAAEHCGTVANGVLQTFMRMAWGGSYIALDSGRGN |
| | | WDCIMTSYQYLIIQNTTWEDHCQFSRPSPIGYLGLLSQRTRD |
| | | IYISRRLLGTFTWTLSDSEGNETPGGYCLTRWMLIEAELKCF |
| | | GNTAVAKCNEKHDEEFCDMLRLFDFNKQAIQRLKSEAQMS |
| | | IQLINKAVNALINDQLIMKNHLRDMMGIPYCNYSKYWYLN |
| | | HTSSGRTSLPKCWLVSNGSYLNETHFSDDIEQQADNMITEM |
| | | LQKEYIDRQGKTPLGLVDLFVFSTSFYLISIFLHLIKIPTHRHI |
| | | VGKPCPKPHRLNHMGICSCGLYKQPGVPTRWKR |
| 3 | Amino acid sequence of | MGQVVTLIQSIPEVLQEVFNVALIIVSTLCIIKGFVNLMRCGL |
| | glycoprotein precursor in | FQLITFLILAGRSCDGMMIDRRHNLTHVEFNLTRMFDNLPQS |
| | Pichinde virus | CSKNNTHHYYKGPSNTTWGIELTLTNTSIANETTGNFSNIRS |
| | | LAYGNISNCDKTEEAGHTLKWLLNELHFNVLHVTRHVGAR |
| | | CKTVEGAGVLIQYNLTVGDRGGEVGRHLIASLAQIIGDPKIA |
| | | WVGKCFNNCSGGSCRLTNCEGGTHYNFLIIQNTTWENHCT |
| | | YTPMATIRMALQKTAYSSVSRKLLGFFTWDLSDSTGQHVPG |
| | | GYCLEQWAIVWAGIKCFDNTVMAKCNKDHNEEFCDTMRL |
| | | FDFNQNAIKTLQLNVENSLNLFKKTINGLISDSLVIRNSLKQL |
| | | AKIPYCNYTKFWYINDTITGRHSLPQCWLVHNGSYLNETHF |
| | | KNDWLWESQNLYNEMLIKEYEERQGKTPLALTDICFWSLV |
| | | FYTITVFLHLVGIPTHRHIIGDGCPKPHRITRNSLCSCGYYKIP |
| | | KKPYKWVRLGK |
| 4 | Amino acid sequence of | MGQFISFMQEIPTFLQEALNIALVAVSLIAIIKGIVNLYKSGLF |
| | glycoprotein precursor in | QFFVFLALAGRSCTEEAFKIGLHTEFQTVSFSMVGLFSNNPH |
| | Junin virus | DLPLLCTLNKSHLYIKGGNASFQISFDDIAVLLPQYDVIIQHP |
| | | ADMSWCSKSDDQIWLSQWFMNAVGHDWHLDPPFLCRNRA |
| | | KTEGFIFQVNTSKTGVNGNYAKKFKTGMHHLYREYPDPCL |
| | | NGKLCLMKAQPTSWPLQCPLDHVNTLHFLTRGKNIQLPRRS |
| | | LKAFFSWSLTDSSGKDTPGGYCLEEWMLVAAKMKCFGNT |
| | | AVAKCNLNHDSEFCDMLRLFDYNKNAIKTLNDETKKQVNL |
| | | MGQTINALISDNLLMKNKIRELMSVPYCNYTKFWYVNHTL |
| | | SGQHSLPRCWLIKNNSYLNISDFRNDWILESDFLISEMLSKE |
| | | YSDRQGKTPLTLVDICIWSTVFFTASLFLHLVGIPSHRHIRGE |
| | | ACPLPHRLNSLGGCRCGKYPNLKKPTVWRRGH |
| 5 | Amino acid sequence of | MGQVIGFFQSLPNIINEALNIALICVALIAILKGIVNIWKSGLI |
| | glycoprotein precursor in | QLFIFLILAGRSCSHTFQIGRNHEFQSITLNFTQFLGYAPSSCS |
| | Oliveros virus | VNNTHHYFRGPGNVSWGIELTLTNNSVINASNSLKVFTNIH |
| | | HNITNCVQNIDEQDHLMKWLIETMHLQIMKPGKRLPPILCE |
| | | KDKGLLIEYNLTNIASREEKHSEYWSQLLYGLSKLLGSSKSL |
| | | WFDYCQRADCMMQEHSSHLKCNYSECSGHTTFKYLILQNT |
| | | TWENHCEFNHLNTIHLLMSSTGQSFITRRLQAFLTWTLSDAT |
| | | GNDLPGGYCLEQWAIVWAGIKCFGNTAVAKCNQNHDSEFC |
| | | DMLRLFDYNRNAIKSLNDQSQSRLNLLTNTINSLISDNLLMK |
| | | NKLAEIMNIPYCNYTKFWYINDTRTGRHTLPQCWLISNGSY |
| | | LNETKFRTQWLSESNALYTEMLTEDYDKRQGSTPLSLVDLC |
| | | FWSTLFYVTTLFAHLVGFPTHRHILDGPCPKPHRLTKKGICS |
| | | CGHFGIPGKPVRWVKRSR |
| 6 | Amino acid sequence of | MGQLISFFGEIPTILQEALNIALIAVSIIATIKGVVNVWKSGLI |
| | glycoprotein precursor in | QLLMFVMLAGRSCSVQIGHHLELEHIILNSSSILPFTPTLCKL |
| | Tamiami virus | NKTYFLVRGPFQAHWGVDLAIGSTTVAVENATKTYTLKSK |
| | | NFTGCFEGNPDPDSAALLVTWLFNSLHHDYKNDPSILCERV |
| | | SGENSFRFQINISEPEYCEKILSRMANLFGSFENYCLNNRHIK |
| | | KLIIIRNLTWSQQCHENHMSAMQLITSNIHTQVVRARRILSFF |
| | | TWSLSDAVGNDMPGGYCLEKWMLIASQLKCFGNTAVAKC |
| | | NLNHDSEFCDMLRLFDFNRKAIETLQNKTRSQLNIAINAINS |
| | | LISDNLLMKNRVKELMDIPFCNYTKFWYVNHTKLNHHSLP |
| | | RCWLVKNGSYLNESEFRNDWLLESDHLISEILSREYEERQG |
| | | RTPLSLVDVCFWSTLFYTASIFLHLIRIPTHRHIVGEGCPKPH |
| | | RLRADSTCACGLYKQKRRPLKWVRSN |
| 7 | Amino acid sequence of | MSLSKEVKSFQWTQALRRELQSFTSDVKAAVIKDATNLLN |
| | nucleoprotein in LCMV | GLDFSEVSNVQRIMRKEKRDDKDLQRLRSLNQTVHSLVDL |
| | | KSTSKKNVLKVGRLSAEELMSLAADLEKLKAKIMRSERPQA |
| | | SGVYMGNLTTQQLDQRSQILQIVGMRKPQQGASGVVRVW |
| | | DVKDSSLLNNQFGTMPSLTMACMAKQSQTPLNDVVQALTD |
| | | LGLLYTVKYPNLNDLERLKDKHPVLGVITEQQSSINISGYNF |
| | | SLGAAVKAGAALLDGGNMLESILIKPSNSEDLLKAVLGAKR |
| | | KLNMFVSDQVGDRNPYENILYKVCLSGEGWPYIACRTSIVG |
| | | RAWENTTIDLTSEKPAVNSPRPAPGAAGPPQVGLSYSQTML |
| | | LKDLMGGIDPNAPTWIDIEGRFNDPVEIAIFQPQNGQFIHFYR |
| | | EPVDQKQFKQDSKYSHGMDLADLFNAQPGLTSSVIGALPQ |
| | | GMVLSCQGSDDIRKLLDSQNRKDIKLIDVEMTREASREYED |
| | | KVWDKYGWLCKMHTGIVRDKKKKEITPHCALMDCIIFESA |
| | | SKARLPDLKTVHNILPHDLIFRGPNVVTL |
| 8 | Amino acid sequence of | MSNSKEVKSFLWTQSLRRELSGYCSNIKLQVVKDAQALLH |
| | nucleoprotein in Lassa | GLDFSEVSNVQRLMRKQKRDDGDLKRLRDLNQAVNNLVE |
| | virus | LKSVQQKSILRVGTLTSDDLLTLAADLEKLKSKVTRTERPLS |
| | | SGVYMGNLSSQQLDQRRALLSMIGMSGGNQNSQPKGDGV |
| | | VRVWDVKNADLLNNQFGTMPSLTLACLTKQGQVDLNDAV |
| | | QALTDLGLIYTAKYPNSSDLDRLSQSHPILNMIDTKKSSLNIS |
| | | GYNFSLGAAIKTGACMLDGGNMLETIKVTPQTMDGILKSIL |
| | | KVKRSLGMFISDTPGERNPYENILYKICLSGDGWPYIASRTAI |
| | | IGRAWENTVVDLESDSKPQKIGSNGSNKSLQSAGFAPGLTY |
| | | SQLMTLKDSMLQLDPNAKTWIDIEGRPEDPVEVALFQPISGC |
| | | YIHFFREPTDLKQFKQDAKYSHGIDVTDLFAAQPGLTSAVIE |
| | | ALPRNMVLTCQGSDDIKKLLDSQGRRDIKLIDVSLNKIDSRK |
| | | FENAVWDQYKDLCHMHTGVVVEKKKKGGKEEITPHCALL |
| | | DCIMFDAAVSGGLNATVLRAVLPRDMVFRTSSPKVVL |
| 9 | Amino acid sequence of | MSDNIPSFRWVQSLRRGLSNWTHPVKADVLSDTRALLSAL |
| | nucleoprotein in Pichinde | DFHKVAQVQRMMRKDKRTDSDLTKLRDMNKEVDALMNM |
| | virus | RSIQRDNVLKVGGLAKEELMELASDLDKLRKKVTRTESLSQ |
| | | PGVYGGNLTNTQLEQRAEILRSMGFANARPTGNRDGVVKI |
| | | WDIKDNTLLINQFGSMPALTIACMTEQGGEQLNDVVQALSA |
| | | LGLLYTVKFPNMTDLEKLTQQHSALKIISNEPSAINISGYNLS |
| | | LSAAVKAAACMIDGGNMLETIQVKPSMFSTLIKSLLQIKNRE |
| | | GMFVSTTPGQRNPYENLLYKICLSGDGWPYIGSRSQVQGRA |
| | | WDNTTVDLDSKPSAIQPPVRNGGSPDLKQIPKEKEDTVVSSI |
| | | QMLDSKATTWIDIEGTPNDPVEMAIYQPDTGNYIHCYRFPH |
| | | DEKSFKEQSKYSHGLLLKDLADAQPGLISSIIRHLPQNMVFT |
| | | AQGSDDIISLFEMHGRRDLKVLDVKLSAEQARTFEDEIWER |
| | | YNLLCTKHKGLVIKKKKKGAAQTTANPHCALLDTIMFDAT |
| | | VTGWVRDQKPMRCLPIDTLYRNNTDLINL |
| 10 | Amino acid sequence of | MAHSKEVPSFRWTQSLRRGLSQFTQTVKSDVLKDAKLIADS |
| | nucleoprotein in Junin | IDFNQVAQVQRALRKTKKGEEDLNKLRDLNKEVDRLMSM |
| | virus | RSVQRNTVFKVGDLGRDELMELASDLEKLKNKIRRAETGS |
| | | QGVYMGNLSQSQLAKRSEILRTLGFQQQGTGGNGVVRIWD |
| | | VKDPSKLNNQFGSVPALTIACMTVQGGETMNSVIQALTSLG |
| | | LLYTVKYPNLSDLDRLTQEHDCLQIVTKDESSINISGYNFSLS |
| | | AAVKAGASILDGGNMLETIRVTPENFSSLIKSTIQVKRREGM |
| | | FIDEKPGNRNPYENLLYKLCLSGDGWPYIGSRSQITGRSWD |
| | | NTSIDLTRKPVAGPRQPEKNGQNLRLANLTEIQEAVIREAVG |
| | | KLDPTNTLWLDIEGPATDPVEMALFQPAGKQYIHCFRKPHD |
| | | EKGFKNGSRHSHGILMKDIEDAMPGVLSYVIGLLPPDMVVT |
| | | TQGSDDIRKLFDLHGRRDLKLVDVKLTSEQARQFDQQVWE |
| | | KYGHLCKYHNGVVVNKKKREKDTPFKLASSEPHCALLDCI |
| | | MFQSVLDGKLYEEEPTPLLPPSLLFLPKAAYAL |
| 11 | Amino acid sequence of | MSGASDIPSFRWTQSLRRGLSHYTTQTKGDVLRDAKSLVDG |
| | nucleoprotein in Oliveros | LDFSQVSQVQRVMRKERRSDDDLLKLRDLNKAVDGLMMM |
| | virus | RNKQSNVSLKVGGLSKDELMELATDLEKLKRKINTNERSTP |
| | | GVYQGNLTTAQLDRRSAILRSLGFQSRQGQNNGVVRIWDIK |
| | | DQKQLINQFGSMPALTIACMSVQGAEQMNDVVQGLTTLGL |
| | | LYTVKYPNLDDLEKLSAEHTCLQFITREESANNISGYNLSLA |
| | | AAVKAGACLVDGGNMLETIYVKPDVFADIIKSLLRVKHQER |
| | | MFVSEKPGMRNPYENILYKICLSGEGWPYIGSRSQITGRAW |
| | | DNTTIDFSKDVMYGPPPPVKNGGNIRLNPLTDTQEAVIKEAI |
| | | SKLNPDETIWVDIEGPPTDPVELALYQPTTGYYIHCFRLPHD |
| | | EKGFKNGSKYSHGILLRDIENARSGLLSRILIKLPSKLVLTCQ |
| | | GSDDIKKLMELNGRPDISTIDLSFPTDQARFYESVVWEKFGS |
| | | LCTKHNGVVLSRKKKGGNSGEPHCALLDCLMFQAAFEGNV |
| | | PSIEPKPLLPSALVFKSESVVAM |
| 12 | Amino acid sequence of | MSDQSVPSFRWVQSLRRGLSAWTTPVKADVLNDTRALLSG |
| | nucleoprotein in Tamiami | LDFSKVASVQRMMRREKRDDNDLTNLRDLNKEVDSLMTM |
| | virus | RSSQKNMFLKVGSLSKDELMELSSDLNKLKEKVQRSERISG |
| | | SSGVYQGNLTTTQLTRRSEILQLVGIQRPGLNRRGGVVKIW |
| | | DIKEPEHSLINQFGSTPAVTISCMAEQGGETLNDVVARPNRS |
| | | VGYFTQQSFLIWVTWRALSSKHSCLKVITQEESQINISGFNLS |
| | | LSAAVKAGACLVDGGNMLETIKVEESTFTTIIKTLLEIKSKE |
| | | RMFVDITPGQRNPYENLLYKLCLSGEGWPYIASRSQIKGRA |
| | | WDNTVIEFDVSPRKPPVPIRNGGSPVLTTLKPEVEEQIKRSIE |
| | | SLSVHDTTWIDIEGPPFDPVEMAIYQPDSLKYIHCYRKPNDV |
| | | KSFKDQSKYCHGILLKDIEYCSSLALYQPSLRHLPKSMVFTA |
| | | QGSEDIRRLFDMHGRQDLKIVDVKFTAEQSRVFEELTWKRF |
| | | EHLCDKHKGIVIKSKKKGTTPASTNAHCALMDCIMFSGVLL |
| | | GAIPNDKPRRLLPLDILFREPDTTVVL |
| 13 | Amino acid sequence of Z | MGQGKSREEKGTNSTNRAEILPDTTYLGPLSCKSCWQKFDS |
| | protein in LCMV | LVRCHDHYLCRHCLNLLLSVSDRCPLCKYPLPTRLKISTAPS |
| | | SPPPYEE. |
| 14 | Amino acid sequence of Z | MGNKQAKAPESKDSPRASLIPDATHLGPQFCKSCWFENKGL |
| | protein in Lassa virus | VECNNHYLCLNCLTLLLSVSNRCPICKMPLPTKLRPSAAPTA |
| | | PPTGAADSIRPPPYSP. |
| 15 | Amino acid sequence of Z | MGLRYSKEVRKRHGDEDVVGRVPMTLNLPQGLYGRFNCK |
| | protein in Pichinde virus | SCWFVNKGLIRCKDHYLCLGCLTKMHSRGNLCEICGHSLPT |
| | | KMEFLESPSAPPYEP |
| 16 | Amino acid sequence of Z | MGNCNGASKSNQPDSSRATQPAAEFRRVAHSSLYGRYNCK |
| | protein in Junin virus | CCWFADTNLITCNDHYLCLRCHQGMLRNSDLCNICWKPLP |
| | | TTITVPVEPTAPPP |
| 17 | Amino acid sequence of Z | MGSKSSKSSGFENVPSLGLSHTNQPRVSLIREARPSLYGRYN |
| | protein in Oliveros virus | CKCCWFQNKNLVECSDHYLCLKCISSMLRRGQNCEICGKPI |
| | | PTHIAVTTAPTAPPEP |
| 18 | Amino acid sequence of Z | MGLRYSKEVRDRHGDKDPEGRIPITQTMPQTLYGRYNCKSC |
| | protein in Tamiami virus | WFANKGLIKCSNHYICLRCLTSMLNRTDYCEICGEVLPKRL |
| | | TFETTPTAPPYTP |
| 19 | Amino acid sequence of L | MDEIISELRELCLNYIEQDERLSRQKLNFLGQREPRMVLIEGL |
| | protein in LCMV | KLLSRCIEIDSADKSGCTHNHDDKSVETILVESGIVCPGLPLII |
| | | PDGYKLIDNSLILLECFVRSTPASFEKKFIEDTNKLACIREDL |
| | | AVAGVTLVPIVDGRCDYDNSFMPEWANFKFRDLLFKLLEY |
| | | SNQNEKVFEESEYFRLCESLKTTIDKRSGMDSMKILKDARST |
| | | HNDEIMRMCHEGINPNMSCDDVVFGINSLFSRFRRDLESGK |
| | | LKRNFQKVNPEGLIKEFSELYENLADSDDILTLSREAVESCP |
| | | LMRFITAETHGHERGSETSTEYERLLSMLNKVKSLKLLNTR |
| | | RRQLLNLDVLCLSSLIKQSKFKGLKNDKHWVGCCYSSVND |
| | | RLVSFHSTKEEFIRLLRNRKKSKVFRKVSFEELFRASISEFIAK |
| | | IQKCLLVVGLSFEHYGLSEHLEQECHIPFTEFENFMKIGAHPI |
| | | MYYTKFEDYNFQPSTEQLKNIQSLRRLSSVCLALTNSMKTS |
| | | SVARLRQNQIGSVRYQVVECKEVFCQVIKLDSEEYHLLYQK |
| | | TGESSRCYSIQGPDGHLISFYADPKRFFLPIFSDEVLYNMIDI |
| | | MISWIRSCPDLKDCLTDIEVALRTLLLLMLTNPTKRNQKQV |
| | | QSVRYLVMAIVSDFSSTSLMDKLREDLITPAEKVVYKLLRFL |
| | | IKTIFGTGEKVLLSAKFKFMLNVSYLCHLITKETPDRLTDQIK |
| | | CFEKFFEPKSQFGFFVNPKEAITPEEECVFYEQMKRFTSKEID |
| | | CQHTTPGVNLEAFSLMVSSFNNGTLIFKGEKKLNSLDPMTN |
| | | SGCATALDLASNKSVVVNKHLNGERLLEYDFNKLLVSAVS |
| | | QITESFVRKQKYKLSHSDYEYKVSKLVSRLVIGSKGEETGRS |
| | | EDNLAEICFDGEEETSFFKSLEEKVNTTIARYRRGRRANDKG |
| | | DGEKLTNTKGLHHLQLILTGKMAHLRKVILSEISFHLVEDFD |
| | | PSCLTNDDMKFICEAVEGSTELSPLYFTSVIKDQCGLDEMAK |
| | | NLCRKFFSENDWFSCMKMILLQMNANAYSGKYRHMQRQG |
| | | LNFKFDWDKLEEDVRISERESNSESLSKALSLTQCMSAALK |
| | | NLCFYSEESPTSYTSVGPDSGRLKFALSYKEQVGGNRELYIG |
| | | DLRTKMFTRLIEDYFESFSSFFSGSCLNNDKEFENAILSMTIN |
| | | VREGFLNYSMDHSKWGPMMCPFLFLMFLQNLKLGDDQYV |
| | | RSGKDHVSTLLTWHMHKLVEVPFPVVNAMMKSYVKSKLK |
| | | LLRGSETTVTERIFRQYFEMGIVPSHISSLIDMGQGILHNASD |
| | | FYGLLSERFINYCIGVIFGERPEAYTSSDDQITLFDRRLSDLV |
| | | VSDPEEVLVLLEFQSHLSGLLNKFISPKSVAGRFAAEFKSRF |
| | | YVWGEEVPLLTKFVSAALHNVKCKEPHQLCETIDTIADQAI |
| | | ANGVPVSLVNSIQRRTLDLLKYANFPLDPFLLNTNTDVKDW |
| | | LDGSRGYRIQRLIEELCPNETKVVRKLVRKLHHKLKNGEFN |
| | | EEFFLDLFNRDKKEAILQLGDLLGLEEDLNQLADVNWLNLN |
| | | EMFPLRMVLRQKVVYPSVMTFQEERIPSLIKTLQNKLCSKFT |
| | | RGAQKLLSEAINKSAFQSCISSGFIGLCKTLGSRCVRNKNRE |
| | | NLYIKKLLEDLTTDDHVTRVCNRDGITLYICDKQSHPEAHR |
| | | DHICLLRPLLWDYICISLSNSFELGVWVLAEPTKGKNNSENL |
| | | TLKHLNPCDYVARKPESSRLLEDKVNLNQVIQSVRRLYPKIF |
| | | EDQLLPFMSDMSSKNMRWSPRIKFLDLCVLIDINSESLSLISH |
| | | VVKWKRDEHYTVLFSDLANSHQRSDSSLVDEFVVSTRDVC |
| | | KNFLKQVYFESFVREFVATTRTLGNFSWFPHKEMMPSEDG |
| | | AEALGPFQSFVSKVVNKNVERPMFRNDLQFGFGWFSYRMG |
| | | DVVCNAAMLIRQGLTNPKAFKSLKDLWDYMLNYTKGVLE |
| | | FSISVDFTHNQNNTDCLRKFSLIFLVRCQLQNPGVAELLSCS |
| | | HLFKGEIDRRMLDECLHLLRTDSVFKVNDGVFDIRSEEFED |
| | | YMEDPLILGDSLELELLGSKRILDGIRSIDFERVGPEWEPVPL |
| | | TVKMGALFEGRNLVQNIIVKLETKDMKVFLAGLEGYEKISD |
| | | VLGNLFLHRFRTGEHLLGSEISVILQELCIDRSILLIPLSLLPD |
| | | WFAFKDCRLCFSKSRSTLMYETVGGRFRLKGRSCDDWLGG |
| | | SVAEDID |
| 20 | Amino acid sequence of L | MEEDIACVKDLVSKYLVDNERLSRQKLAFLVQTEPRMLLM |
| | protein in Lassa virus | EGLKLLSLCIEVDSCNANGCEHNSEDKSVERILHDHGILTPS |
| | | LCFVVPDGYKLTGNVLILLECFVRSSPANFEQKYIEDFKKLE |
| | | QLKEDLKSVDINLIPLIDGRTSFYNEQIPDWVNDKLRDTLFS |
| | | LLKYAQESNSLFEESEYSRLCESLSMTSGRLSGVESLNVLMD |
| | | NRSNHYEEVIASCHQGINNKLTAHEVKLQIEEEYQVFRNRL |
| | | RKGEIEGQFLKVDKSQLLNELNNLYADKVVAEDNIEHLIYQ |
| | | FKRASPILRFLYANVDEGNEKRENQTIGECQVQCWRSFLNK |
| | | VKSLRILNTRRKLLLIFDALILLASKHDLMKQKCLKGWLGS |
| | | CFLSVNDRLVSLESTKRDLEKWVERRQQAERSRITQSSQCLS |
| | | KNQILNSIFQKTILKATTALKDVGISVDHYKIDMEVICLNSY |
| | | DLIMDFDVSGVVPTISYQRTEEETFPYVMGDVELLGTTDLE |
| | | RLSSLSLALVNSMKTSSTVKLRQNEFGPARYQVVRCKEAYC |
| | | QEFSLGNTELQLIYQKTGECSKCYAINDNKVGEVCSFYADP |
| | | KRYFPAIFSAEVLQTTISTMISWIEDCNELEGQLNNIRSLTKM |
| | | ILVLILAHPSKRSQKLLQNLRYFVMAYVSDYHHKDLIDKIRE |
| | | ELITDVEFLLYRLIRTLMNLVLSEDVKSMMTNRFKFILNVSY |
| | | MCHFITKETPDRLTDQIKCFEKFLEPKVRFGHVSTNPADTAT |
| | | EEELDDMVYNAKKFLSKDGCTSIEGPDYKRPGVSKKYLSLL |
| | | TSSFNNGSLFKEREVKREIKDPLITSGCATALDLASNKSVVV |
| | | NKYTDGSRILNYDFNKLTALAVSQLTEVFSRKGKYLLNKQD |
| | | YEYKVQQAMSNLVLGSGQLKSDADGADLDEILLDGGASDY |
| | | FDQLKETVEKIVDQYREPVKLGSGPNGDGQPSINDLDEIVSN |
| | | KFYIRLIKGELSNHMVEDFDHDILPGKFYEEFCNAVYENSRL |
| | | KQKYFYCGHMSQCPIGELTKAVSTRTYFNHEYFQCFKSILLI |
| | | MNANTLMGRYTHYKSRNLNFKFDMGKLSDDVRISERESNS |
| | | EALSKALSLTNCTTAMLKNLCFYSQESPQSYDSVGPDTGRL |
| | | KFSLSYKEQVGGNRELYIGDLRTKMFTRLIEDYFEAISLQLS |
| | | GSCLNNEKEFENAILSMKLNVSLAHVSYSMDHSKWGPMMC |
| | | PFLFLTVLQNLIFLSKDLQADIKGRDYLSTLLMWHMHKMVE |
| | | IPFNVVTAMMKSFIKAQLGLRKKTKQSITEDFFYSNFQVGV |
| | | VPSHISSILDMGQGILHNTSDFYALISERFINYAISCICGGTID |
| | | AYTSSDDQISLFDQSLTELLQRDPEEFRTLIEFHYYMSDQLN |
| | | KFVSPKSVIGRFVAEFKSRFFVWGDEVPLLTKFVAAALHNIK |
| | | CKEPHQLAETIDTIIDQSVANGVPVHLCNLIQKRTLNLLQYA |
| | | RYPIDPFLLNCETDVRDWVDGNRSYRIMRQIEGLIPNACSKI |
| | | RSMLRKLYNRLKTGQLHEEFTTNYLSSEHLSSLRNLCELLD |
| | | VEPPSESDLEYSWLNLAAHHPLRMVLRQKIIYSGAVNLDDE |
| | | KIPTIVKTIQNKLSSTFTRGAQKLLSEAINKSAFQSSIASGFVG |
| | | LCRTLGSKCVRGPNKENLYIKSIQSLISDVKGIKLLTNSNGIQ |
| | | YWQVPLELRNGSGSESVVSYFRPLLWDYMCISLSTAIELGA |
| | | WVLGEPKTVKVLDFFKHNPCDYFPLKPTASKLLEDRVGLN |
| | | HIIHSLRRLYPSVFEKHILPFMSDLASTKMKWSPRIKFLDLCV |
| | | ALDVNCEALSLVSHIVKWKREEHYIVLSSELRLSHSRTHEP |
| | | MVEERVVSTSDAVDNFMRQIYFESYVRPFVATTRTLGSFTW |
| | | FPHKTSVPEGEGLHRMGPFSSFVEKVIHKGVERPMFKHDLM |
| | | MGYAWIDFDIEPARFNQNQLIASGLVDPKFDSLEDFFDAVA |
| | | SLPPGSAKLSQTVRFRVKSQDASFKESFAIHLEYTGSMNQQ |
| | | AKYLVHDVTVMYSGAVSPCVLSDCWRLVLSGPTFKGKSA |
| | | WYVDTEIINEFLIDTNQLGHVTPVEIVVDMERLQFTEYDFVL |
| | | VGPCTEPTPLVVHRGGLWECGKKLASFTPVIQDQDLEIFVRE |
| | | VGDTSSDLLIGALSDMMIDRLGLRMQWSGVDIVSTLRAAAP |
| | | SCEGILSAVLEAVDNWVEFKGYALCYSKSRGKVMVQSSGG |
| | | KLRLKGRTCEELTRKDECIEDIE. |
| 21 | Amino acid sequence of L | MEEYVFELKDIVRKWVPEWEELSEQKNNVLAQVKDRAITIE |
| | protein in Pichinde virus | GLKLLSMLVEVDSCKKHSCKHNTKMTVNAILRELRVTCPTL |
| | | PDVTPDGYCMVGDVLILLEVFVRTSQEAFEKKYNQDFLKLL |
| | | QLSSDLKRQNITLVPVIDGRSSYYVEFVPDWVVERLRWLLL |
| | | KLMDGLRTSGEEVEELEYERLISSLSSLENQSLGLESLLAVK |
| | | ERGLPYKVRLEKALMSGINNKLTTDQCRTKIMEIFQQFKML |
| | | QLAGQLDRKLQATDREDMISRLQNHEFIQCSVKDVPKSEIR |
| | | LCEFCSVHILGIIGQLRQSEVKHSSTESREYFRVLSICNKIKSQ |
| | | KVFNTRRNTMLVLDLIMYNILCDLDKSSPGAVFREVLLMQG |
| | | LPSVNDRLINVDFLMEQITKKFIKNPNWLEKAKKRLSSVCG |
| | | ELPLDDILPLLREPDVEYYFNLKTSVLDEWGAKPCLQYKTK |
| | | SQCMCGGRPGRGQPDYTIMGESEFEELLKTLSSLSLSLINSM |
| | | KTAAVPKMKVNNADEFYGKVYCDEVFFQRFGEGGSLTLLY |
| | | QKTGERSRCYAVAYRSKSGGLYETKASFYCDPKRFFLPIFSA |
| | | DVIQRTCVEMLSWLDFMSQPLLDSVSDLLRRLILCILCTPSK |
| | | RIQVYLQGFRYYIMAFVNEVHFKELFEKLKVVMLTPSEWQT |
| | | AMLIDDLILLVLSNSREEDMAKIFKFVLNVSYLCHFITKETP |
| | | DRLTDQIKCFEKFLEPKLKFDSVLVNPSNSMELPTEEEEKMV |
| | | HDIERLLGKKLESKCEGRPGLNKDVLSVCLSLFNSSSLEVKP |
| | | LLPCDPMTPSFTSTALDMSSNKSVVVPKLNEVGEVITEYDYS |
| | | SIVSAVVVEMIEHFKTKGKYKLDPKEVNFKILKRLSSLIQIKK |
| | | ESIEPDGVEELLSEDQGDCLKEIETRVAKVLSKVDTNVKTNL |
| | | KTSCPLERLWPKSTMVVIKRETSLHDVKDFDYSLFSAEVYE |
| | | DLVNLIYEDVTARSVYFADRLMNPCPLEFLIKNLTLKAYKE |
| | | ADYFECFKYILIASDYDNRVGRYDHKSRSRLGFTDAALQIRE |
| | | TSRISSRESNSESIAKRLDQSFFTNSSLRNLCFYSDESPTERSG |
| | | VSTNVGRLKFGLSYKEQVGGNRELYVGDLNTKLTTRLIEDY |
| | | SESLMQNMRYTCLNNEKEFERALLDMKSVVRQSGLAVSM |
| | | DHSKWGPHMSPVIFAALLKGLEFKLKDGSEVPNAAVINILL |
| | | WHIHKMVEVPFNVVEAYMKGFLKRGLGMMDKGGCTIAEE |
| | | FMFGYFEKGKVPSHISSVLDMGQGILHNTSDLYGLITEQFIN |
| | | YALELCYGARFISYTSSDDEIMLSLNEGFKFKDRDELNVELV |
| | | LDCMEFHYFLSDKLNKFVSPKTVVGTFASEFKSRFFIWSQEV |
| | | PLLTKFVAAALHNIKAKAPNQQADTIDTILDQCVANGVSIEV |
| | | VGAIAKRTNSMIIYSGFPNDPFLCLEEMDVLDWVNGSRGYR |
| | | LQRSIETLFPDDLLLSIIRKACRKIFYKIQSGALEESYIVTTLQ |
| | | QSPDDCLKQLLETCDVETEAIEDALNIRWLNLRVHGDLRLV |
| | | LRTKLMSTTRTVQREEIPSLVKSVQSKLSKNYVRGAKKILA |
| | | DAINKSAFQSSIASGFIGVCKSMGSKCVRDGKGGFKYIRDIT |
| | | SKIILHRDCHFCNQRKGVYCKAALGEVSEYSRPLIWDYFAL |
| | | VLTNACELGNWVFQKAEVPKIVTHLNNPNHFWPIKPSTHSE |
| | | LEDKVGINHILYSIRRNFPTLFDEHISPFLSDLNMLRLSWVQR |
| | | IKFLDLCVAIDITSECLGIVSHIIKHRREELYIVKQNELAMSHS |
| | | RESHPLERGFNLEPEEVCTNFLIQILFESMLVPVIMSTSQFKK |
| | | YFWFGELELLPNNAQHDLKQLTQFICDCKKNNTSRTMNLD |
| | | DLDVGFVSSKLILSCVNLNISVFINELDWVNRDNYENIEQLIL |
| | | ASPSEVIPIELNLTFSHKRVSHKFRYERSTNYILKLRFLIERES |
| | | LLDSLDSDGYLLLNPHSVEYYVSQSSGNHISLDGVSLLVLNP |
| | | LINGKDVLDFNDLLEGQDIHFKSRSTVFQKVRIDLKNRFKDL |
| | | KNKFSYKLIGPDVGMQPLILEGGLIKEGNRVVSRLEVNLDS |
| | | KVVIIALEALEPEKRPRFIANLFQYLSSAQSHNKGISMNEQD |
| | | LRLMIENFPEVFEHMLHDAKDWLNCGHFSIIRSKTLGSVMIA |
| | | DETGPFKIKGIRCRKLFEDNESVEIE |
| 22 | Amino acid sequence of L | MEESVNEIKSLIRKHFPERQELAYQRDIFLSQHHPSSLLLEGF |
| | protein in Junin virus | KLLSSLVELESCEAHACQINSDQKFVDVILSDYGILCPTLPKV |
| | | IPDGFKLTGKTLILLETFVRVNPDEFERKWKSDMSKLLNLKS |
| | | DLLRAGITLVPVVDGRSSYSNRFLADWVVERVRWLLIDILK |
| | | KSKFMQEINIEEQEYQRLIHSLSNTKNQSLGLENIECLKKNSL |
| | | GYDERLNESLFVGVRGDIRESVIREELIKLRFWFKKEIFDKQ |
| | | LGKFKFSQKSKLINDLILLGSHKDSDVPSCPFCANKLMDVV |
| | | YSIALHPIDEVNMESQSDENSISIDAVERCYLQALSVCNKVK |
| | | GLKVFNTRRNTLLFLDLVLLNLLCDLFKTHDDAIVRLRNAG |
| | | IVVGQMLMLVNDRLLDILEAIKLIRKKLMTSPKWVQACSRT |
| | | LKNSHQDLWSQLEKLIKHPDMDSLMILAQALVSDRPVMRY |
| | | TINKEFEKICRHQPFSSLVEGEQKKLFRILSSISLALVNSMKTS |
| | | FSSRLLINEREYSRYFGNVRLRECYVQRFHLTKNTFGLLFYQ |
| | | KTGEKSRCYSIYLSINGVLEEQGSFYCDPKRFFLPIFSEDVLIE |
| | | MCEEMTSWLDFSHELMTMTRPILRLLVLAVLCSPSKRNQTF |
| | | LQGLRYFLMAYANQIHHVDLMSKLRVDCMSGSEVLIQRMA |
| | | VELFQTILGEGEDADLYFARRFKYLLNVSYLCHLVTKETPD |
| | | RLTDQIKCFEKFIEPKVKFDCVVVNPPLSGSLTLEQEDTMIR |
| | | GLDRFFSKEAKTSSDTQIPGVCKEILSFCISLFNRGRLKVTGE |
| | | LKSNPYRPNITSTALDLSSNKSVVIPKLDELGNILSVYDKEKL |
| | | VSTCVSTMAERFKTKGRYNLDPDSMDYLILKNLTGLVSTGS |
| | | RTRTNQEELSVMYESLTEDQVRAFEGIRNDVQMTLAKMAN |
| | | SEGTKVEITKLKSKNPSVDERESLESLWAPFGVLREIKAEVS |
| | | MHEVKDFDPDVLRSDVYKELCDAVYLSPFKLTYFLEAPQDI |
| | | CPLGLLLKNLTTIAYQEDEFFECFKYLLIQGHYDQKLGSYEH |
| | | RSRSRLGFSSEVLRLKDEVRLSTRESNSEAIADKLDKSYFTN |
| | | AALRNLCFYSDDSPTEFTSISSNTGNLKFGLSYKEQVGSNRE |
| | | LYVGDLNTKLMTRLVEDFSEAVGSSMKYTCLNSEKEFERAI |
| | | CDMKMAVNNGDLSCSYDHSKWGPTMSPALF |
| | | LSFLYTLELKNPRDRTKVNLEPVMNILKWHLHKVVEVPINV |
| | | AEAYCVGKLKRSLGLMGCDCTSVGEEFFHQYLQSRDQVPS |
| | | HtMSVLDMGQGILHNTSDLYGLITEQFLCYALDLLYDVIPVT |
| | | YTSSDDQVSLIKIPCLSDEKFQDRTELLEMVCFHEFLSSKLN |
| | | KFISPKSVIGTFVAEFKSRFFVMGEETPLLTKFVSAALHNVK |
| | | CKTPTQLSETIDTICDQCIANGVSTHIVSKISIRVNQLIRYSGY |
| | | RETPFGAIEEQDVKDWVDGSRGYRLQRKIEAIFSDDKETMFI |
| | | RNCARKVFNDIKRGKIFEENLINLISRGGDEALSGFLQYAGC |
| | | SEDEIRQTLDYRWVNLASFGDLRLVLRTKLMTSRRVLEKEE |
| | | MPTLIRTIQSRLSRNFTKGVKKILAESINKSAFQSSVASGFIGF |
| | | CKSMGSKCVRDGKGGFLYIKDIFTRIMPCLCGICERKPKVIY |
| | | CQKSLKEVNQFSKPILWDYFSLVLTNACELGEWVFSAIKSP |
| | | QAPLVLCNKNFFWAVKPKAVRQIEDQLGMNHVLHSIRRNY |
| | | PKLFEEHLAPFMNDLQVNRSLDSGRLKFLDVCVALDMMNE |
| | | NLGIISHLLKVRDNNVYIVKQSDCASAHVRQSEYTNWEVGI |
| | | SPQQVCRNFMVQVVLSSMINPLVMSTSCLKSFFWFNEVLDL |
| | | EDDSQVDLAELTDFTLSVRNNKVSRAMFVEDIAMGYVVSS |
| | | FDNIKVFLEGVSVDNISLLPQEDMMDLHTVLRNVACQEAV |
| | | KLKLIIQVEHTRVSTKFKLRRKMVYSYTIVSSLGVDDVGTPE |
| | | LELNVDAMSQCVSGSEGSHSLLDGALVIASLPLFTGHESFDL |
| | | AGLFIDAGYAATNDDNILSHVKFNFGDFYSELSNKYAYDLI |
| | | GPDNPGEPLVLKEGIFYRGNERLSTYRVELSGDVIVKAIGAL |
| | | EDIDSVETLLSQLWPYLKTTSQTILFQQEDFVLVYDLHKEQL |
| | | IRSLDKFGDWLEFSNFKVAFSRSLNDLLISDPQGQFRLKGVT |
| | | CRPLKHKVEIKDID. |
| 23 | Amino acid sequence of L | MDESVSSLFDLLRKHFPAKEEISRQITVVTSQTEMRMILTEG |
| | protein in Oliveros virus | FKLLSLLIELDSCEVNNCSHNKEDLTVEAILSKDNILTIALPRI |
| | | VPDGYSLYGNVLILLETFVRVNPSSFEQKYNQDMNKLLSLK |
| | | NDLQLCGITLVPLVDGRTNYYNKFVDDWVIERFRWLLTQI |
| | | MKVAKESGESIEELEYQRLVTSLSKLENQSLGFENIIKMPQT |
| | | GIDYRDKLKARMFANLSNKMKESEINQSLLSLKLAFDEAYN |
| | | DESHLKKFQKTNKEDLIFKLGQQINLSDEKLSCMSCSSKLFSI |
| | | VSSITQNRDKLDSHVMSVSNAKLWHHESGIANVNEYLRILS |
| | | VCNKIKSAKILNTRRNTLLFLDMIVLNFIDDCWKNDPTILFQ |
| | | FKKSGLLVGQLAYFVNDRFFDLLLLKELLSKKLKSSPDWIH |
| | | RCLCNIRKQEFFDISGVEFWIRQPDYESVEELCCALEPVKPK |
| | | LQYCRDEDNHENHKLDLADKDNYFTCLSVLSSVCLGLVNS |
| | | MKTSFTSKMVINEKSPNNFYGEVELKECYCQRFYVSDEITG |
| | | LLFYQKTGEKSRCYSIGVTMHGSYKYIGSFYCDPKRFFLPIFS |
| | | QVVLFQMTEEMMSWLPEEPSYKEPVVANLRKLILMLLCNP |
| | | SKRNQNFLQGMRYFIMAYVNQFHSVELMSKLEVPCKSVSE |
| | | ECVQKLTYNLLVDVLTKGDVNEHMTRKFKFCLNVSYLCHL |
| | | ITKETPDRLTDQIKCFEKFLEPKLKFKSVIINPNLTGDLTEEQE |
| | | EQLLNSIEKLLGKGLQDINDSSEPGISRELLSMCISAFNRDLL |
| | | RVNGKLKNDPYKPNFTSTALDLSSNKSVVIPKLDELGNPISK |
| | | YDYELLVSSCIASMAESFKTKGKYKLDPTSQEFLILKNLYSL |
| | | MSKSKRDDHMKDSEDSKQNLSSDLENLSEEQVLILEQVKRD |
| | | VNLALSKMRETKLKEKTEARQSSSGSSLKNQQKRQAELQE |
| | | RLSELWSEFMCMKIITVEVSLHEIKDFDPDLIDHTTLKSMLD |
| | | KLYNSDLASEFFLEEILNPCPLEFLVKNMTTSSYLEGDLFECF |
| | | KYTLISAGFDQKLGTYEHKNKTRLGFKYEALKVREEGRMS |
| | | LRESNSEAIARRLDRSVFSNSALRNLCFYSDESPISYSHVSSD |
| | | TGKLKFGLSYKEQVGSNRELYVGDLNTKLMTRLIEDFSESV |
| | | VSNMNYSCLNSEKEFERSVMEMKMSVNLGEMNFSLDHSK |
| | | WGPYMSPVIFAAFLQGLKLEQGSMCTPVSVEPIITLLSWHIH |
| | | KVVEVPYNVIHAYMTGMIKRQLGLMSPGESSKTEAFIHRLL |
| | | VDEREPLSHVMSVLDMGQGILHNTSDLYGLVTEQFINYAM |
| | | RILYDVSMTSFTSSDDQITMVKLNEDLKDMDNPEVISNWER |
| | | MINFHTFISSKFNKFVSPKTVIGTFAAEFKSRFFVWGEEVPLL |
| | | TKFVSAALHNIKCKTPIQLSETIDTISDQCVANGVSVEIVSCIS |
| | | NRTNKLVRYSGFPDNPFLSVENMDVKDWVDGNRGYRLQR |
| | | NIESHLEVDGCTRFVRQAARKVFRNIKSGKIMEQTLVNLVQ |
| | | EDGDKAFQGFMKSVDVSDDDIKLLQNFRWINLSTHGDMRL |
| | | VLRTKLMSSRRIIEQEEIPGLIKSIQSKLSKNFVRGAKRILADS |
| | | INKSAFQSSIASGFIGFCKSMGSKCVRLGGGGFGYIKDIKNK |
| | | VKHDCLCDICFRWRGCVYCPSSCADVFEFSRPLMWDYFTL |
| | | VLTNACELGEWVFEDVEIPKDLYFLRNPNLFWLVKPRVTCQ |
| | | LEERLGLSHILQSIRKNYPTLFETHLSPFMSDFMVGKTLGSLT |
| | | VKFLDLCVALDLANENLGITKHFLKERRHEIYVVKQDESSQ |
| | | SHIRNVKGIESSVELNSMQVCNNFLTQLLMSSFIQPLVLTSSV |
| | | FKKFNWFAEVLCLKTEEEVCLKQLTDFVLQVKKFNVDRAM |
| | | HIEDLSAGYISSTINVTSFSLSVPTFLECVDSDFINKEGNEPGD |
| | | FKDLLSSEFTKDTLTLDFCIQVSHIKRSVKFNVKRTLVYTLA |
| | | VRTQIEKKIILEAIGTDDQISLIVSELDLFCSGHTGNHFVLDA |
| | | APLIYSEPLIAGSLKFDLLSMLRDQELSLTSSEKMPTFNFDFS |
| | | SQKHHIVNKFAYKLVGPSVYDEPLVLNKGIVYSGERKLTSL |
| | | GVDVSGERIVQAMGELDSISEQELFLTNLWGYSKETDIKVRI |
| | | IQDNLKILTDNYFVQLKNSLKTFAEWLNLGNYMLCYSKTLD |
| | | TIMISDVSGRIKLKGVICRKLIEDEVMEVE |
| 24 | Amino acid sequence of L | MSECLTYFNELKDLVRKWVPDEDTYVEQKTVLLSQVNFSSI |
| | protein in Tamiami virus | VTEGLKLLSTLIEVDSCVKHGCIHNRSKTVNQILYDHRIVGP |
| | | TLPDVVPDGYRVSGSTLILLETFVRVNQESFECKYRHDFEKL |
| | | MQLSKDLAKCGLTLVPVIDGRSSYYIERLPDWVIERMRWLL |
| | | LRIMSNLRDSGEKIEEMEYERLVHSLSNMENQNLGLESLAS |
| | | LREEGLDYKTRLTKTLKEGIYSNMTTSECRVGIAKLYDHFC |
| | | LLRDSGQYEDVYTTTSRSEMITWLKTHELVQMSSSERETLIE |
| | | AETCKFCQIHMYAVLKDLVLLRKGWKGSRCRDANEILAHK |
| | | SLLSDCNKIKGLKVLNTRRNTLLCLDIIVLNSLINLIKLQYTD |
| | | LQYLINNHFKSVNDRLVSVDLIINKLDKRLTSDPNWLCKLR |
| | | TKIGHKLKIYDLDHVISWLRPIEVSHWYEFKLERDNSGECV |
| | | KPTIKYKKSGVGDCQGEDCNKDVITDDSTFSDYLDALSTLS |
| | | MGLMNSMKTSSATKLVVNDERNYFGTVQCDECYFQDLDIN |
| | | YGTTLIYQKTGEGTRCYGKVSKEGGGPDVYKVGKSFYADP |
| | | KRYFLPIMSSEVILKMCREMLSWLDWLSEKEMMDVRTKLY |
| | | TLVISILTVPSKRVQIYLQGFRYFIMAYVNEFHVKELVCKLK |
| | | VKPLTRAELSVFTQMDDLVALLLTGTSEEHMTKSFKFILNLS |
| | | YLCHLITKETPDRLTDQIKCFEKFLEPKLTFNSVILNLDSSPQ |
| | | LTEGTEEKIIGDLKKLFSKDLGVLDLKEPGVSKEVLSLCSSCF |
| | | NNGMLSLPKVLSRDPQSPSFTSTALDISSNKSVVVPKLNEVG |
| | | ETITQYDYQSLLSSVVVEMAQSFKDKLRFKLDRRSLQYAIY |
| | | KRLTNMVSKNEFRSKDDPNDSGILEDIEDLVDEGTHKLINEI |
| | | EANVSDCLSKMSSGCNKSNQSSKGLKKFEKVDLLQKLWSR |
| | | EYMSLILSETSFHEVKDFDPSLLPSESYQEMCDAVYDSVYR |
| | | NEFFTEKFLKLCPLELLIKNLATKHYEEGDYFECFKYLLIGA |
| | | GCDNRVGRFDHRSRARLGFKDTATLVKEESRISSRESNSEAI |
| | | SKRLDKSFFTNSSLRNLCFYSEESPTYRSSVSSSVGKLKFGLS |
| | | YKEQVGSNRELYIGDLNTKLTSRLIEDYFESLTSECRFSCLN |
| | | NDSEFERALLDMKSVVRLSGLAVSLDHSKWGPYMSPAIFN |
| | | ALFSNLDLQLKDGGLIDKSPIENLLNWHLHKIVEVPYNVVE |
| | | AYLKGYTKRSLGLMDRSSSSMTEDYFFRQFAKGVVPSHITS |
| | | VLDMGQGILHNASDYYGLLTEQFITLCLELCFDVKMTAYTS |
| | | SDDEIMLSNSYSLKRESDDDLLDMEKCKEILEFHYYLSSKLN |
| | | KFISPKTVAGSFASEFKSRFFIWSQEVPLLTKFVAAALHNVK |
| | | AKSPHQLAETIDTILDQCAANGVSIEIINELSKRTNRLISYSGH |
| | | PVDPFLCVFTTDLKDWVDGSRGYRLQRSIESIINSEEILSTIRD |
| | | SCRQLFYMIRSGRIQEEYLISALQSSPDDCLRQMLKITGTNDS |
| | | LIEEALTTRWLNLRAFGDLRLVLRTKIMTGTRILDKEEVPSLI |
| | | KSVQSKLSKNFVRGAKKIITDAINKSAFQSSICSGFIGLCKSM |
| | | GSKCVRDGSGGFIYIKDLLKKIDRHTNCEVCCPLLSVFCEHS |
| | | LRQVAPYSRPLLWDYFSLTFSNACELGNWVFSKVELPRPPL |
| | | GSMNPNFFWPVKPGSHSELEDKVNMNHVLYSIKRNFPDLFD |
| | | EHIAPFLSDLNSLKVSWVQRIKFLDLCVAMDMSSECLGIISHI |
| | | MRKRREELYIVKQEELSVCHIRESCSLEKGLQLNSVEICQNF |
| | | LTQLLFESMLNPVLLSTSQFKKYFWYGEVEFLPNDADHDLG |
| | | QLTQFIMDCKLLNISRCMCLDDLDVGYVHSKIELSQVFINLS |
| | | TFINLVDWENRESYQSFDEVLIHSNADHIPLEIGIILSHTRKSF |
| | | KFRYERKTNYYVKCGITIQKSEISSFSTTLSDGFELHVEEIDC |
| | | YVSGSEGDHISLDGVGLVPLHPLFSGKEALDLNKLLSDQDIE |
| | | FKQISLVFSKVKLDFKDHVKDLKNKFSYKLQGPEQGLEPLH |
| | | LDKGQIMERNTVVSRLEVPVTSRSLFLALEALDPGNRPRFLS |
| | | SLHEYMRKRPGKKDPCFVRMTQQDLCLLVELYEAAFMQVL |
| | | SAVSDWIEFGCFALCFSKTLNCIMIADDGGDYRLKGRPCKT |
| | | LSAQKTLTDIE. |
| 25 | Amino acid sequence of | MGQIVTMFEALPHIIDEVINIVIIVLIIITSIKAVYNFATCGILAL |
| | GP signal peptide in | VSFLFLAGRSCG |
| | LCMV | |
| 26 | Amino acid sequence of | MGQIITFFQEVPHVIEEVMNIVLIALSLLAILKGVYNVATCGII |
| | GP signal peptide in Lassa | GLVTFLFLCGRSCS |
| | virus | |
| 27 | Amino acid sequence of | MGQVVTLIQSIPEVLQEVFNVALIIVSTLCIIKGFVNLMRCGL |
| | GP signal peptide Pichinde | FQLITFLILAGRSCD |
| | virus | |
| 28 | Amino acid sequence of | MGQFISFMQEIPTFLQEALNIALVAVSLIAIIKGIVNLYKSGLF |
| | GP signal peptide in Junin | QFFVFLALAGRSCT |
| | virus | |
| 29 | Amino acid sequence of | MGQVIGFFQSLPNIINEALNIALICVALIAILKGIVNIWKSGLI |
| | GP signal peptide in | QLFIFLILAGRSCS |
| | Oliveros virus | |
| 30 | Amino acid sequence of | MGQLISFFGEIPTILQEALNIALIAVSIIATIKGVVNVWKSGLI |
| | GP signal peptide in | QLLMFVMLAGRSCS |
| | Tamiami virus | |
| 31 | Amino acid sequence of | MYGLNGPDIYKGVYQFKSVEFDMSHLNLTMPNACSANNSH |
| | GP1 in LCMV | HYISMGSSGLELTFTNDSILNHNFCNLTSAFNKKTFDHTLMS |
| | | IVSSLHLSIRGNSNHKAVSCDFNNGITIQYNLSFSDPQSAISQ |
| | | CRTFRGRVLDMFRTAFGGKYMRSGWGWAGSDGKTTWCS |
| | | QTSYQYLIIQNRTWENHCRYAGPFGMSRILFAQEKTKFLTR |
| | | RLA |
| 32 | Amino acid sequence of | LIYKGSYELQTLELNMETLNMTMPLSCTKNSSHHYIRVGNE |
| | GP1 in Lassa virus | TGLELTLTNTSIINHKFCNLSDAHKRNLYDHALMSILSTFHL |
| | | SIPNFNQYEAMCDFNGGKISVQYNLSHAYAVDAAEHCGTV |
| | | ANGVLQTFMRMAWGGSYIALDSGRGNWDCIMTSYQYLIIQ |
| | | NTTWEDHCQFSRPSPIGYLGLLSQRTRDIYISRRLL |
| 33 | Amino acid sequence of | GMMIDRRHNLTHVEFNLTRMFDNLPQSCSKNNTHHYYKGP |
| | GP1 Pichinde virus | SNTTWGIELTLTNTSIANETTGNFSNIRSLAYGNISNCDKTEE |
| | | AGHTLKWLLNELHFNVLHVTRHVGARCKTVEGAGVLIQYN |
| | | LTVGDRGGEVGRHLIASLAQIIGDPKIAWVGKCFNNCSGGS |
| | | CRLTNCEGGTHYNFLIIQNTTWENHCTYTPMATIRMALQKT |
| | | AYSSVSRKLL |
| 34 | Amino acid sequence of | EEAFKIGLHTEFQTVSFSMVGLFSNNPHDLPLLCTLNKSHLY |
| | GP1 in Junin virus | IKGGNASFQISFDDIAVLLPQYDVIIQHPADMSWCSKSDDQI |
| | | WLSQWFMNAVGHDWHLDPPFLCRNRAKTEGFIFQVNTSKT |
| | | GVNGNYAKKFKTGMHHLYREYPDPCLNGKLCLMKAQPTS |
| | | WPLQCPLDHVNTLHFLTRGKNIQLPRRSLK |
| 35 | Amino acid sequence of | HTFQIGRNHEFQSITLNFTQFLGYAPSSCSVNNTHHYFRGPG |
| | GP1 in Oliveros virus | NVSWGIELTLTNNSVINASNSLKVFTNIHHNITNCVQNIDEQ |
| | | DHLMKWLIETMHLQIMKPGKRLPPILCEKDKGLLIEYNLTNI |
| | | ASREEKHSEYWSQLLYGLSKLLGSSKSLWFDYCQRADCMM |
| | | QEHSSHLKCNYSECSGHTTFKYLILQNTTWENHCEFNHLNTI |
| | | HLLMSSTGQSFITRRLQ |
| 36 | Amino acid sequence of | VQIGHHLELEHIILNSSSILPFTPTLCKLNKTYFLVRGPFQAH |
| | GP1 in Tamiami virus | WGVDLAIGSTTVAVENATKTYTLKSKNFTGCFEGNPDPDSA |
| | | ALLVTWLFNSLHHDYKNDPSILCERVSGENSFRFQINISEPEY |
| | | CEKILSRMANLFGSFENYCLNNRHIKKLIIIRNLTWSQQCHE |
| | | NHMSAMQLITSNIHTQVVRARRIL |
| 37 | Amino acid sequence of | GTFTWTLSDSSGVENPGGYCLTKWMILAAELKCFGNTAVA |
| | GP2 in LCMV | KCNVNHDEEFCDMLRLIDYNKAALSKFKQDVESALHVFKT |
| | | TVNSLISDQLLMRNHLRDLMGVPYCNYSKFWYLEHAKTGE |
| | | TSVPKCWLVTNGSYLNETHFSDQIEQEADNMITEMLRKDYI |
| | | KRQGSTPLALMDLLMFSTSAYLISIFLHLVKIPTHRHIKGGSC |
| | | PKPHRLTNKGICSCGAFKVPGVKTIWKRR |
| 38 | Amino acid sequence of | GTFTWTLSDSEGNETPGGYCLTRWMLIEAELKCFGNTAVA |
| | GP2 in Lassa virus | KCNEKHDEEFCDMLRLFDFNKQAIQRLKSEAQMSIQLINKA |
| | | VNALINDQLIMKNHLRDMMGIPYCNYSKYWYLNHTS SGRT |
| | | SLPKCWLVSNGSYLNETHFSDDIEQQADNMITEMLQKEYID |
| | | RQGKTPLGLVDLFVFSTSFYLISIFLHLIKIPTHRHIVGKPCPK |
| | | PHRLNHMGICSCGLYKQPGVPTRWKR |
| 39 | Amino acid sequence of | GFFTWDLSDSTGQHVPGGYCLEQWAIVWAGIKCFDNTVMA |
| | GP2 Pichinde virus | KCNKDHNEEFCDTMRLFDFNQNAIKTLQLNVENSLNLFKKT |
| | | INGLISDSLVIRNSLKQLAKIPYCNYTKFWYINDTITGRHSLP |
| | | QCWLVHNGSYLNETHFKNDWLWESQNLYNEMLIKEYEER |
| | | QGKTPLALTDICFWSLVFYTITVFLHLVGIPTHRHIIGDGCPK |
| | | PHRITRNSLCSCGYYKIPKKPYKWVRLGK |
| 40 | Amino acid sequence of | AFFSWSLTDSSGKDTPGGYCLEEWMLVAAKMKCFGNTAV |
| | GP2 in Junin virus | AKCNLNHDSEFCDMLRLFDYNKNAIKTLNDETKKQVNLMG |
| | | QTINALISDNLLMKNKIRELMSVPYCNYTKFWYVNHTLSGQ |
| | | HSLPRCWLIKNNSYLNISDFRNDWILESDFLISEMLSKEYSD |
| | | RQGKTPLTLVDICIWSTVFFTASLFLHLVGIPSHRHIRGEACP |
| | | LPHRLNSLGGCRCGKYPNLKKPTVWRRGH |
| 41 | Amino acid sequence of | AFLTWTLSDATGNDLPGGYCLEQWAIVWAGIKCFGNTAVA |
| | GP2 in Oliveros virus | KCNQNHDSEFCDMLRLFDYNRNAIKSLNDQSQSRLNLLTNT |
| | | INSLISDNLLMKNKLAEIMNIPYCNYTKFWYINDTRTGRHTL |
| | | PQCWLISNGSYLNETKFRTQWLSESNALYTEMLTEDYDKR |
| | | QGSTPLSLVDLCFWSTLFYVTTLFAHLVGFPTHRHILDGPCP |
| | | KPHRLTKKGICSCGHFGIPGKPVRWVKRSR |
| 42 | Amino acid sequence of | SFFTWSLSDAVGNDMPGGYCLEKWMLIASQLKCFGNTAVA |
| | GP2 in Tamiami virus | KCNLNHDSEFCDMLRLFDFNRKAIETLQNKTRSQLNIAINAI |
| | | NSLISDNLLMKNRVKELMDIPFCNYTKFWYVNHTKLNHHS |
| | | LPRCWLVKNGSYLNESEFRNDWLLESDHLISEILSREYEERQ |
| | | GRTPLSLVDVCFWSTLFYTASIFLHLIRIPTHRHIVGEGCPKP |
| | | HRLRADSTCACGLYKQKRRPLKWVRSN |
| 43 | Peptide epitope derived | LPYLGWLVF |
| | from P1A | |
| 44 | Immunodominant NP- | RPQASGVYM |
| | derived backbone epitope | |
| 45 | Peptide epitope derived | RAHYNIVTF |
| | from HPV16 E7 protein | |
| 46 | Immunodominant NP- | FQPQNGQFI |
| | derived backbone epitope | |
| 47 | NP-derived backbone | YTVKYPNL |
| | epitope | |
| 48 | Amino acid sequence of | MSSENVPSFRWTQSLRRGLSNWTHAVKGDVLADARAIVSA |
| | glycoprotein precursor | LDFHQVAQVQRMMRKDKRSEADLTRLRDMNKEVDALMM |
| | (GPC) protein in | MRSAQKDNILKVGGLSKDELMELASDLDKLRKKVQRTEGG |
| | Allpahuayo virus (ALLV) | GQPGVYAGNLTSSQLNQRSEILKMMGMGTGPRGPVGGVV |
| | | KVWDIKDSSLLVNQFGSMPALTIACMTQQGGEQMNDVVQ |
| | | ALTSLGLVYTVKYPNLSDLEKLTEKHPCLKLITQEPAQINISG |
| | | YNLSLSAAVKADACMIDGGNMLETLQVKPSMFSTLIKTILE |
| | | VKNREGMFVSPSPGQRNPYENILYKVCLSGDGWPYIGSRSQ |
| | | IKGRAWENTTVDLEGKPSVNHPPVRNGGSPDLKQIPKTKED |
| | | EVIRAIEQLDPRGTTWVDIEGPPGDPVELALFQPETGNYLHC |
| | | YRRPHNENAFKDQSKFSHGLLLKDLADTQPGLISCIIRHLPN |
| | | NMVLTAQGNDDIIKLLEMHGRRDIKVLDVKLSSDQARLME |
| | | DVVWERYNMLCVKHTGLVIKKKKKGAAPGSANPHCALLD |
| | | CIMFDATVTGYLRDQKPKRLLPLDTLYRDNANLINL |
| 49 | Amino acid sequence of | MSSENVPSFRWTQSLRRGLSNWTHAVKGDVLADARAIVSA |
| | NP protein in ALLV | LDFHQVAQVQRMMRKDKRSEADLTRLRDMNKEVDALMM |
| | | MRSAQKDNILKVGGLSKDELMELASDLDKLRKKVQRTEGG |
| | | GQPGVYAGNLTSSQLNQRSEILKMMGMGTGPRGPVGGVV |
| | | KVWDIKDSSLLVNQFGSMPALTIACMTQQGGEQMNDVVQ |
| | | ALTSLGLVYTVKYPNLSDLEKLTEKHPCLKLITQEPAQINISG |
| | | YNLSLSAAVKADACMIDGGNMLETLQVKPSMFSTLIKTILE |
| | | VKNREGMFVSPSPGQRNPYENILYKVCLSGDGWPYIGSRSQ |
| | | IKGRAWENTTVDLEGKPSVNHPPVRNGGSPDLKQIPKTKED |
| | | EVIRAIEQLDPRGTTWVDIEGPPGDPVELALFQPETGNYLHC |
| | | YRRPHNENAFKDQSKFSHGLLLKDLADTQPGLISCIIRHLPN |
| | | NMVLTAQGNDDIIKLLEMHGRRDIKVLDVKLSSDQARLME |
| | | DVVWERYNMLCVKHTGLVIKKKKKGAAPGSANPHCALLD |
| | | CIMFDATVTGYLRDQKPKRLLPLDTLYRDNANLINL |
| 50 | Amino acid sequence of Z | MGLRYSKEVRDRHGDKDIEGRVPMTLNLPQGLYGRFNCKS |
| | protein in ALLV | CWFVNKGLIACGDHYLCLGCLTRMLSRTDFCEICSKPLPKKI |
| | | IFEDSPSAPPYEP |
| 51 | Amino acid sequence of L | MDVHLIELRDLVRKWVPDDLELSEQKNIMLAQTQIRATVVE |
| | protein in ALLV | SLKLLSTIVEVDSCKKHSCVHNTSKTVNAILREHKIIGPTLPD |
| | | VTPDGYCVIGDVLILLEVFVRTNQESFEKKFNQDFEKLMQM |
| | | SADLKKCGVTLVPTIDGRSTYYVDFIPDWVVERLRWLISRL |
| | | MSSLREDGQEIEELEYERLISSLSSLENQSLGLESLLAMREKG |
| | | LSYKETLDKLFLEGMENKLTVDESRTRIMKMFQIFRTLLESG |
| | | YLERKYQTTDREDMLKRLRDHEFIVCSKSVEYTFDCPNCSV |
| | | HLYKVLNLLLNQGSRGAPHQCLGEYMKTLSICNKIKSMKIL |
| | | NTRRNTLLILDTIMLNKFLDLEKVFGHVVVERVMIMQSLMT |
| | | VNDRLLSIDVLMEMLEKKMTRNPLWFLKVNEKLRKLCPPE |
| | | VYQSIEEYVHEVDRDHWFELKLTLHQTWPAKPLIDYKGKM |
| | | RCTCVEKDSNNKNQLSDLTEEKFQLLLKKLSSFCLGITNSLK |
| | | TSAVAKLRVNQPDDYYGKVTCSEVFFQSLDKEHSAVLLYQ |
| | | KTGEKSRAYGLAFNNVVTGQYTTEASFYCDPKRFFLPIMSD |
| | | VVLFRMCNEMLSWLDYLSDDVMLEVRTCLYRLVLSILCTPS |
| | | KRVQVYIQGLRYFIMAFVNEFHCTGLLDKLKVTALTESERY |
| | | CMKLCDDLVVKVLNSVEDENMAKAFKFVLNTSYLCHLITK |
| | | ETPDRLTDQIKCFEKFLEPKLDFGSVIVNPDSSCELTAGQEEQ |
| | | FYQGLEKLFTDKKLESSYANKPGVCKEVLNVCMSLFNSGA |
| | | LEVKPLLNHDPITPSFTSTALDLSSNKSVVVPKLDELGEVLT |
| | | EYDYSKLVSSVVVDLVEHFKTKGKYVVSPRSLQYKIYKRLS |
| | | NLVQQRAGKGNKESELTEEEFLEQVTAEQLEVINKVETKVS |
| | | RTLSGIKLSSDTENAKHDDDYHLKKLWSKDIMVRIKAETSL |
| | | HEVKDFNVDTLPFDLYRELVDAIYNDPAANSHYFSERIFNPC |
| | | PLELLIKNLTLKAYKEEDFFECFKYILISSNFDNKVGKYDHK |
| | | NRSRLGLSSAALLVKDEARISMRESNSESIAKRLDKSFFTNSS |
| | | LRNLCFYSDESPTERTSVSSNVGKLKFGLSYKEQVGGNREL |
| | | YVGDLNTKLTTRLVEDYAESLTSDMKYTCLNNENEFERAL |
| | | LDMKSVVRQSGLAVSMDHSKWGPHMSPALFSLMLRGLDF |
| | | RLKDGTLIDKEAVVNILSWHIHKMVEVPFNVVEAYLKGFIK |
| | | RGLGLMDRGGATRVEEFMFGYFDQGIVPSHISSVIDMGQGI |
| | | LHNLSDLYGLITEQFIVYALDLCYSSSFMAYTSSDDEILLSIS |
| | | NSFKRNDGSMDMDLAIEALEFHYFLSDRLNKFVSPKTVAGT |
| | | FASEFKSRFFIWSQEVPLLTKFVAASLHNVKAKAPSQLAETI |
| | | DTILDQSVANGVSIEIIGAIAPRTNALITYSGHPFNLFLCLEET |
| | | DVRDWVDGSRGYRLQRSIENAFPDDVLPEIIRSACRKIFYRI |
| | | QSGTLEEDYIVTTLQQSPDDCLKQMLTSCDVEKEAIDDICNY |
| | | RWLNLRAHGDLRLVLRTKIMTSTRTLQKEEVPSLIKSVQSK |
| | | LSKNFVRGAKKILADAINKSAFQSCISSGFVGVCKSMGSKC |
| | | VRDGKGGFKYIKDILKEIKHHEKPDCHFCKELKGIYCSELLE |
| | | NISEFSRPLFWDYFSLVLSNACELGNWVFCKIEIPKSVYHLN |
| | | NPNHFWPIKPSSHAELEEKVGMNHVLYSIRRNFPVLFDEHIS |
| | | PYLSDLNMLKLNWVQKIRFLDICVAIDMTSECLGIISHIIRRK |
| | | REELYIVKQSELSMSHTRVSLPLERGFNIEPDEVCHNFLLQIL |
| | | FESMIHPVLLTTSQFKRYFWYSEVELLPKEALHDLGQFTQFII |
| | | DCKVLNSSRAMCLDDLDVGYVSSKVKRTDTYLNLSTFMTN |
| | | LDWENRHEYSSFEDLILSSPSEVFLFEITFTFSHIRRSHKFRYD |
| | | RSTNYILKTKLVIEKSELVNGEDGVYCVTPHSIEYYVSQSSG |
| | | NHISLDGVSLLVLDPLISGRELVNMDELLQNQDVTFSAPSQI |
| | | LSKIKLDFKPFTKEIKNKFSYKLIGPDVDMSPLHLDKGAIKE |
| | | GDRIVSQIEIQVSFKSVITAIELLDEDQRKIFVGNLFVYLTSLK |
| | | SVNRALSMSESDLRLLVENYPSVIEYMLSGCDGWLNCGSFS |
| | | LIKSKTLQCIMLADERGPYRIKGQNCRRLFPTEEAIEIE |
| 52 | Amino acid sequence of | MGQIVTFFQEVPHIIEEVMNIVLITLSLLAILKGIYNVMTCGLI |
| | glycoprotein precursor | GLLTFLFLCGKSCSTIYKDNYRLMQLNLDMSGLNATMPLSC |
| | (GPC) protein in Mobala | SKNNSHHYIQVFNTTGLELTLTNDSLIGHKWCNLSDAHKKD |
| | virus (MOBV) | TYDHTLMSIISTFHLSIPNFNHYEAMACDFNGGKISIQYNLSH |
| | | SSETDAMNHCGTVANGVLEVFRRMTWCTHCDTPLGASIAG |
| | | FNCVRTSYKYLIIQNTTWEDHCTMSRPSPMGYLSLLSQRAR |
| | | EIYISRRLMGTFTWTLSDSEGNDLPGGYCLQRWMLIEAEMK |
| | | CFGNTAVAKCNQQHDEEFCDMLRLFDFNKEAIHRLRVEAE |
| | | KSISLINKAVNSLINDQLIMRNHLRDIMGIPYCNYSRFWYLN |
| | | DTRSGRTSLPKCWMVSNGSYLNETHFSSDIEQEANNMITEM |
| | | LRKEYERRQGTTPLGLVDLFVFSTSFYLISVFLHLIKIPTHRH |
| | | LVGKPCPKPHRLNHMGVCSCGLYKQPGLPTKWKR |
| 53 | Amino acid sequence of | MGQIVTFFQEVPHIIEEVMNIVLITLSLLAILKGIYNVMTCGLI |
| | GP signal peptide in | GLLTFLFLCGKSCS |
| | MOBV | |
| 54 | Amino acid sequence of | TIYKDNYRLMQLNLDMSGLNATMPLSCSKNNSHHYIQVFN |
| | GP1 protein in MOBV | TTGLELTLTNDSLIGHKWCNLSDAHKKDTYDHTLMSIISTFH |
| | | LSIPNFNHYEAMACDFNGGKISIQYNLSHSSETDAMNHCGT |
| | | VANGVLEVFRRMTWCTHCDTPLGASIAGFNCVRTSYKYLII |
| | | QNTTWEDHCTMSRPSPMGYLSLLSQRAREIYISRRLM |
| 55 | Amino acid sequence of | GTFTWTLSDSEGNDLPGGYCLQRWMLIEAEMKCFGNTAVA |
| | GP2 protein in MOBV | KCNQQHDEEFCDMLRLFDFNKEAIHRLRVEAEKSISLINKA |
| | | VNSLINDQLIMRNHLRDIMGIPYCNYSRFWYLNDTRSGRTS |
| | | LPKCWMVSNGSYLNETHFSSDIEQEANNMITEMLRKEYERR |
| | | QGTTPLGLVDLFVFSTSFYLISVFLHLIKIPTHRHLVGKPCPK |
| | | PHRLNHMGVCSCGLYKQPGLPTKWKR |
| 56 | Amino acid sequence of | MSNSKEIKSFLWTQSLRRELSGFCTNTRVQVIKDAQSLLHGL |
| | NP protein in MOBV | DFSEVSNIQRLMRKEKRDDSDLKRLRDLNQTVNNLVELKSS |
| | | QQKNTLRVGALTSDDLLVLAADLDRLKAKVNRSERPLTGG |
| | | VYMGNLTQQQLDQRKILLQLVGMGGSRVPPRGGDGIVRV |
| | | WDVRNPDLLNNQFGTMPSLTLACLCKQGQEDLSDVVKALT |
| | | DLGLVYTAKYPNLSDLDKLTHTHPVLGLIDGNKSAINISGY |
| | | NFSLNAAVKAGASLLDGGNMLETIKVTPKNIDTILKCVLKV |
| | | KRSVGMFVSDTPGERNPYENILYKICLSGDGWPYIACRTSIS |
| | | GRAWDNTEVDLGTNKDPINKGPPTSNKTAGAAGFNAGLTY |
| | | SQMMELKDSMLQIDPTAKTWVDIEGRADDPVEIAIYQPSNG |
| | | HYIHFYREPTDIKQFRQDAKYSHGIDVQDLFTTQPGLTSAVL |
| | | ENLPKNMVLTCQGVEDIRKLLDSQGRKDIKLIDVSMQKAD |
| | | ARKFEHQIWDEYKHLCSMHTGIVVEKKKRGGKEEITPHCAL |
| | | LDCLMFEATTRNSLDIVIPRPVLSKDLVFRSATPKVIL |
| 57 | Amino acid sequence of Z | MGQKPSKPKAPPTTYESPRSSLTPDATGFGPEFCKSCWFERK |
| | protein in MOBV | GLIKCQNHYLCMTCLTLLLTVSNRCPVCKYPLPTKLRLEKSP |
| | | TAPPPEATNPPPYSP |
| 58 | Amino acid sequence of L | MEEQISEVKDIISKYLSNDDRLAKQKLAFLVQSEPKLLLIEGL |
| | protein in MOBV | KLLSLCIEIDSCEANGCDHNTKELSVENFLSENRVLCPGLPM |
| | | VVPDGFKLNGNVLMILECFVRSSPANFEQKYREDLVKLNSL |
| | | KEDLMTVGITMLPLIDGRTNFQTDRLPEWANERFRTLLFSLL |
| | | AFSQESSRMFEEAEYSRLCESLNVSGGKRSGIENINILSDHRS |
| | | EHFDELLKLCHVGINNHMSSLDVKREIIQEFQAFRNKLQNG |
| | | VIERQFLRVNREELIKAFNEMYTLRVGDKPELLDSLLNDYY |
| | | HSCPLITMLYCELPNGKSCQSDISHVRGWRSLLNKVKSLRLI |
| | | NTRRKLMLIFDSILLLAHMKDLSVNGHLVESEWMGSSFLSV |
| | | NDRLVSLPATQKDLKTWLQRRTNRLSHSHQSQSAYEVFST |
| | | MVNRVLNKAKEVLLLVNLTFKDYNVDEDILSESSFTEMMS |
| | | LEVNGVEPTINYEKNPIDRFSYNIQAMDPDNQSDLKRLSSISL |
| | | ALVNSMKTSSTVKLRQNEHGKLRYKCVRCKEAYYQDFLIE |
| | | GHRLMLIYQKTGECSKCYSVNDAVVGELCSFYADPKRYFP |
| | | AIFSDSVLQEMIDTMISWLTECSELKEFIKEIKSLLKMVVMV |
| | | VLTNPTKRIQKFLQNLRYFTMAYVSEYHHKDLLEKLREDLI |
| | | TNCEFLLYRITRSILNIVFNVNVTTMITNRFKFILNLSYLCHLI |
| | | TKETPDRLTDQIKCFEKFIEPKMKFDSVNVNPLEPADQEELR |
| | | SLLMSADKFLSKPDCFGDEGILFKTPGVSRKIFSMMVSSFNN |
| | | GSLFKQAELKNGVKDPLVVSGCATALDLASNKSVVVNKYT |
| | | DGDRIIEYDYDKLVATAVCQLSEVFSRKGKYVLSKEDYDFK |
| | | IQQIMSDLVIGRSKLHGSEIGLNSCEEVDEVLIEGGAADYFDS |
| | | IKQSVDTVMSKFSWSGSESSATLKSECSIDDLSLALQDKAQL |
| | | RLIRNELSCHMVEDFDVMTLPYDTYEEICKSVYSDPSLRSKY |
| | | FYLESLESCPLTKMAQAVCTRTFHDEEYFQCFKSLLLQMNA |
| | | NKLSGKFNHYKSKCLNFKLDRDRLFNETRISERESNSEALSK |
| | | ALSLTNCTTAALKNLCFYSQESPQSYNSQGPDTGRLKFSLSY |
| | | KEQVGGNRELYIGDLRTKMFTRLIEDYFEALTSQFKGSCLN |
| | | DEHEFENAVFSMKFNVSLGLLSYSLDHSKWGPMMTPFLFL |
| | | ATLQNINWPSLDTLSDAKSRDYVSSMLSWHIHKLVEVPFNV |
| | | VTAMMKSFIKSKLGLKKNLSETMTERFFFEHFRLGKVPSHIS |
| | | SILDKGQGILQNTSDFYGLISERFINYCISCLYEGNVDAFTSS |
| | | DDQISLFDKSLSDLLEKDPDEFEYILEFHNYLSDQLNKFISPK |
| | | SVKGNFAAEFKSRFFVWGDEVPLLTKFVAASLHNIKCKEPH |
| | | QLAETIDTIIDQAVANGVPVKLCNIVQERTLNLLRYAQYPID |
| | | PFLMFCSSDVKDWVDGNRGYRIMRNIEMLEPNGTRKVRSF |
| | | LRRLYNNLKTGLLHEEFTAAYLSGDPYQSLAKLSKIFDTEIL |
| | | NDEELGLSWLNLSAYYPLRMVLRQKVIYTGAVNVEEEKLP |
| | | TIVKTLQNKLSSNFTRGAQKLLSEAINRSAFQSCIASGFVGLC |
| | | RTLGSKCVRGPERENFYIKSIMNQSMMMEGVSRELVMGVD |
| | | VWRVRNPLDNSRAQQKWGNYFRPILWDYLCIALSTALEIGS |
| | | WVLGEPKLKSPLPQMKFRPCDYFPMKPSVTRLLEDKVGFN |
| | | HIIHSFRRLYPDIFEKHLLPFMSDLASTKMKWSPRVKFLDLC |
| | | VMLDVNCEAMSLVSHIVKWKREEHYVILSDELSISHDRSHE |
| | | SLADERVVSTEDVSENFLRQIYFESFARPFVATSRTLGSFTW |
| | | FPHKTSLPESEGLASLGPFGTFIEKVIFKGIERPMYRHDLFSG |
| | | YAWLDFDFGEFYINSSKLIQYGLTEMRYFEDLSEFMSMLSSL |
| | | KPGSIEISLTVNFQVKSQGESLREKFFIHCKFYGSFDVDGKFE |
| | | FNNIGVQYSGAINRSAVLDCWRLILTNSHFLGDKVIWHLNT |
| | | ANIKDYLKDGSMVGEVVPIEVIINRDALRLDTLDFERVGPD |
| | | VNVVPLVVKDGYIFEGDKKLVPFNPSIHDQDFEILVKELCID |
| | | DKELLKDMIQKMITVRGSQGLQWHSLDIVAVLTKNMPTNY |
| | | KDFITESLSVLDSWTGFKGYSLCFSKTKNTLMIHTSEGNLRL |
| | | KGKLCRKLFDDPVHVEDIE |
| 59 | Amino acid sequence of | MGQIVTFFQEVPHILEEVMNIVLMTLSILAILKGIYNVMTCGI |
| | glycoprotein precursor | IGLITFLFLCGRSCSSIYKDNYEFFSFDLDMSSLNATMPLSCS |
| | (GPC) protein in Mopeia | KNNSHHYIQVGNETGLELTLTNTSIIDHKFCNLSDAHRRNLY |
| | virus (MOPV) | DKALMSILTTFHLSIPDFNQHEAMSCDFNGGKISVQYNLSHS |
| | | NYVDAGNHCGTIANGIMDVFRRMYWSTSLSVASDISGTQCI |
| | | QTDYKYLIIQNTSWEDHCMFSRPSPMGFLSLLSQRTRNFYIS |
| | | RRLLGLFTWTLSDSEGNDMPGGYCLTRSMLIGLDLKCFGNT |
| | | AIAKCNQAHDEEFCDMLRLFDFNKQAISKLRSEVQQSINLIN |
| | | KAVNALINDQLVMRNHLRDLMGIPYCNYSKFWYLNDTRTG |
| | | RTSLPKCWLVTNGSYLNETQFSTEIEQEANNMFTDMLRKEY |
| | | EKRQSTTPLGLVDLFVFSTSFYLISVFLHLIKIPTHRHIKGKPC |
| | | PKPHRLNHMAICSCGFYKQPGLPTQWKR |
| 60 | Amino acid sequence of | MGQIVTFFQEVPHILEEVMNIVLMTLSILAILKGIYNVMTCGI |
| | GP signal peptide in | IGLITFLFLCGRSCS |
| | MOPV | |
| 61 | Amino acid sequence of | SIYKDNYEFFSFDLDMSSLNATMPLSCSKNNSHHYIQVGNE |
| | GP1 protein in MOPV | TGLELTLTNTSIIDHKFCNLSDAHRRNLYDKALMSILTTFHL |
| | | SIPDFNQHEAMSCDFNGGKISVQYNLSHSNYVDAGNHCGTI |
| | | ANGIMDVFRRMYWSTSLSVASDISGTQCIQTDYKYLIIQNTS |
| | | WEDHCMFSRPSPMGFLSLLSQRTRNFYISRRLL |
| 62 | Amino acid sequence of | GLFTWTLSDSEGNDMPGGYCLTRSMLIGLDLKCFGNTAIAK |
| | GP2 protein in MOPV | CNQAHDEEFCDMLRLFDFNKQAISKLRSEVQQSINLINKAV |
| | | NALINDQLVMRNHLRDLMGIPYCNYSKFWYLNDTRTGRTS |
| | | LPKCWLVTNGSYLNETQFSTEIEQEANNMFTDMLRKEYEK |
| | | RQSTTPLGLVDLFVFSTSFYLISVFLHLIKIPTHRHIKGKPCPK |
| | | PHRLNHMAICSCGFYKQPGLPTQWKR |
| 63 | Amino acid sequence of | MSNSKEVKSFLWTQSLRRELSGYCSNIKIQVIKDAQALLHG |
| | NP protein in MOPV | LDFSEVANVQRLMRKEKRDDSDLKRLRDLNQAVNNLVELK |
| | | SVQQKNVLRVGTLTSDDLLVLAADLDRLKAKVIRGERPLA |
| | | AGVYMGNLTAQQLEQRRVLLQMVGMGGGFRAGNTLGDGI |
| | | VRVWDVRNPELLNNQFGTMPSLTIACMCKQGQADLNDVIQ |
| | | SLSDLGLVYTAKYPNMSDLDKLSQTHPILGIIEPKKSAINISG |
| | | YNFSLSAAVKAGACLIDGGNMLETIKVTKSNLEGILKAALK |
| | | VKRSLGMFVSDTPGERNPYENLLYKLCLSGEGWPYIASRTSI |
| | | VGRAWDNTTVDLSGDVQQNAKPDKGNSNRLAQAQGMPA |
| | | GLTYSQTMELKDSMLQLDPNAKTWIDIEGRPEDPVEIAIYQP |
| | | NNGQYIHFYREPTDIKQFKQDSKHSHGIDIQDLFSVQPGLTS |
| | | AVIESLPKNMVLSCQGADDIRKLLDSQNRRDIKLIDVSMQK |
| | | DDARKFEDKIWDEYKHLCRMHTGIVTQKKKRGGKEEVTPH |
| | | CALLDCLMFEAAVIGSPQIPTPRPVLSRDLVFRTGPPRVVL |
| 64 | Amino acid sequence of Z | MGKTQSKGQPSTNLLKETEPRHPVIPDARGTGPEFCKSCWF |
| | protein in MOPV | ERRGLVRCNDHYLCLNCLTLLHTVSDRCPICKHKLPFRLEL |
| | | QTQPTAPPEIPPSQNPPPYSP |
| 65 | Amino acid sequence of L | MEELLSESKDLVSRYLLEDERLSKQKLAFLVQTEPRMLLIEG |
| | protein in MOPV | LKLLSLCIEIDSCKANGCEHNSEDLSVEILLQRQGVLCPGLPF |
| | | VVPDGFKFSGNTLILLECFVRTSPINFEQKYKEDTIKLESLKP |
| | | DLSSVDIILLPLIDGRTNFYTDLFPEWANERFRHILFSLLEFSQ |
| | | QSSKMFEESEYSRLCESLTKAGVRTSGIESLNVLTDSRSDHY |
| | | ERVLELCHRGINNKMSILDVKKEIVSEFHAFRNKLKEGEIER |
| | | QFVRTDRRQLLRDFNNLYIDREGDTPSEIDPLKERFVKSSPM |
| | | VTALYGDYDRYRQEGVDRDSCLQNHFQSSVPGWKSLLNKI |
| | | KSLKLLNTRRKLMLTFDAIILLAHLKDLKCHGELLGSEWLG |
| | | SSFLSVNDRLVSLQETQKDLKKWIERRMVSAMKKKGGVGT |
| | | LCQRSELIFFDIINKLLTKAKEALSSASLCFRDYVKEEDILEE |
| | | DSYERLMLMEKRGIQPTMSYEKEEGNQFPYPLIELEADSIED |
| | | LRRLSSISLALVNSMKTSSVAKVRQNEYGAARYKRVRCKE |
| | | AFNQSFIMGSGNFNLIYQKTGECSKCYAINNPEKGEICSFYA |
| | | DPKRFFPAIFSHCVIYETINTMMSWLSECIELRDQQKTLKLLL |
| | | KITMILILVNPSKRAQKFLQGLRYFIMAFVSDFHHKQLMEKL |
| | | REDLITEPEHLLYSVVRSILNIILGEGVSTMLTNRFKFVLNLS |
| | | YMCHFITKETPDRLTDQIKCFEKYLEPKLEFDSININPSEEGD |
| | | EDERMLLLESANKFLSKETSMSNNRISYKVPGVSRKFFSMM |
| | | TSSFNNGSLFKKGDDLSGFKDPLVTAGCATALDLASNKSVV |
| | | VNKYTDGERILYYDHDKLVAASVCQLSEVFQRKTKYLLSK |
| | | EDYDYKVQKAISDLVVGKKSGSSNPNSQGAPDELDELFLDS |
| | | CALDCLEDVKKSVDVVLEKYRYDRKFPVGNGSEEKSLTDL |
| | | RKVLGTEDVGCVYYRLIQAEIAHHMVEDFDESLLPGDAYE |
| | | MICKGFFKDLELRSKYFYLDSLDSCPITCITQAVSTRTFNDQ |
| | | QFFQCFKSLLLQMNAGKLAGKYSHYKNKCLNFKIDRERLM |
| | | NDVRISERESNSEALGKALSLTNCTTAVLKNLCFYSQESPQS |
| | | YTSLGPDTGRLKFSLSYKEQVGGNRELYIGDLRTKMFTRLIE |
| | | DYFEALTKQYRGSCLNNEKEFHNAILAMKLNVSLGQVSYSL |
| | | DHSKWGPMMSPFLFLVFLQNLRWETRDDIEDIKSKDYVSTL |
| | | LSWHIHKLIEVPFNVVNAMMRSYLKSRLGLKKSLHQTSTEA |
| | | FFFEYFKQNRIPSHLSSIIDMGQGILHNASDFYGLVSERFINY |
| | | CIKCLFEDEVDSYTSSDDQISLFGKDLSDLLSNEPEEFQAILE |
| | | FHYFLSDQLNKFISPKSVIGSFVAEFKSRFYVWGDEVPLLTK |
| | | FVAAALHNVKCKEPHQLAETIDTIIDQSVANGVPVTLCNAIQ |
| | | ERTLNLLRYAQYPIDPFLLFLDSDVKDWVDGNRGYRIMRNI |
| | | EAILPESTQKVRKVLRTVFNKLKLGELHEEFTAIYLSGDPAD |
| | | SFKKLTSLVGDDTLSEEDLSVCWLNLTTHHPLKMVMRQKV |
| | | IYTGAVELGEEKLPTLVKTLQSKLSSNFTRGAQKLLCEAVN |
| | | KSAFQSGIASGFIGLCKTLGSKCVRFSDRSTAYIKSLVSRLSA |
| | | LDSVSSLKVKGVDLWILGKEHTKAAEEALGFLRPVLWDYF |
| | | CIALSTSLELGSWVLGEPKVKEKTSSIPFKPCDYFPMKPTTT |
| | | KLLEDKVGFNHIIHSFRRLYPSLFERHLLPFMSDLASTKMRW |
| | | TPRIKFLDLCVVLDVNCEAMSLISHVVKWKREEHYVVLSSD |
| | | LAIAHERSHLPITDERVVTTYDVVQNFLRQIYFESFIRPFVAT |
| | | SRTLGSFTWFPHRSSIPESEGLDNLGPFSSFIEKVIYKGVERP |
| | | MYRHDLYSGYAWLDFECAPAILNLGQLIASGLTEQHVFESV |
| | | SELLEAFADLSVGSVQISVTVNFQVRSQGESLKEKFSLHLLF |
| | | KGVVLEGGLFKPHSLDVTYSGSVQRSAIKDCWRVAQTSTW |
| | | FKRETTSIWLLSTENICDYLRDSSPIPDVIPLSVLLNEEILDLE |
| | | EHDFTHIGPEHVEIPLVVDSGYLIEGTRKLLPFNPNIHDQDLN |
| | | VFIGELMEDHSEILERSLSKMLRSRMDQGLHWLQLDIIGVV |
| | | GRCMPEGYENFLTRVFSGIDFWADFKGYSLCYSRSQASLMI |
| | | QSSEGKFRLRGRLCRPLFEEVGPPLDIE |
| 66 | Amino acid sequence of | MGQIITFFQEVPHIIEEVMNIVLITLSLLAILKGVYNVMTCGLI |
| | glycoprotein precursor | GLISFLLLCGKSCSLIYKDTYNFSSIELDLSHLNMTLPMSCSR |
| | (GPC) protein of Ippy | NNSHHYVFFNGSGLEMTFTNDSLLNHKFCNLSDAHKKNLY |
| | virus (IPPV) | DHALMGIVTTFHLSIPNFNQYEAMACDFNGGNISIQYNLSH |
| | | NDRTDAMNHCGTVANGVLDAFYRFHWGRNITYIAQLPNG |
| | | DGTGRWTFCYATSYKYLVIQNISWADHCQMSRPTPIGFASIL |
| | | SQRIRSIYISRRLMSTFTWSLSDSSGTENPGGYCLTRWMLFA |
| | | ADLKCFGNTAIAKCNLNHDEEFCDMLRLIDFNKQALKTFKS |
| | | EVNHGLQLITKAINALINDQLIMKNHLRDLMGIPYCNYSKF |
| | | WYLNDTRTGRVSLPKCWMISNGTYLNETHFSDEIEQEADN |
| | | MITEMLRKEYQERQGKTPLGLVDLFIFSTSFYSITVFLHLIKIP |
| | | THRHIVGQGCPKPHRLNSRAICSCGAYKQPGLPTKWKR |
| 67 | Amino acid sequence of | MGQIITFFQEVPHIIEEVMNIVLITLSLLAILKGVYNVMTCGLI |
| | the GP signal peptide of | GLISFLLLCGKSCS |
| | IPPV | |
| 68 | Amino acid sequence of | LIYKDTYNFSSIELDLSHLNMTLPMSCSRNNSHHYVFFNGSG |
| | GP1 of IPPV | LEMTFTNDSLLNHKFCNLSDAHKKNLYDHALMGIVTTFHLS |
| | | IPNFNQYEAMACDFNGGNISIQYNLSHNDRTDAMNHCGTV |
| | | ANGVLDAFYRFHWGRNITYIAQLPNGDGTGRWTFCYATSY |
| | | KYLVIQNISWADHCQMSRPTPIGFASILSQRIRSIYISRRLM |
| 69 | Amino acid sequence of | STFTWSLSDSSGTENPGGYCLTRWMLFAADLKCFGNTAIAK |
| | GP2 of IPPV | CNLNHDEEFCDMLRLIDFNKQALKTFKSEVNHGLQLITKAI |
| | | NALINDQLIMKNHLRDLMGIPYCNYSKFWYLNDTRTGRVS |
| | | LPKCWMISNGTYLNETHFSDEIEQEADNMITEMLRKEYQER |
| | | QGKTPLGLVDLFIFSTSFYSITVFLHLIKIPTHRHIVGQGCPKP |
| | | HRLNSRAICSCGAYKQPGLPTKWKR |
| 70 | Amino acid sequence of | MANSKEVKSFLWTQALRRELGQYCSTVKSSIIKDAQSLLHS |
| | nucleoprotein of IPPV | LDFSEVSNIQRLMRKDKRNDSDLKRLRDLNQAVFNLVELKS |
| | | TQQKNVLRVGKLTSDDLLVLAADLDRLKNKVMRTERPQTL |
| | | GVYMGNLTNQQLDQRKRLLDMIGISNARNAPRPGADGVVR |
| | | VWDVKDSSLLNNQFGTMPSLTLACMSKQGQYELNDVVQS |
| | | LTDLGLVYAAKYPNAMDLEKLTQAHPVLSIIDVSKSSINVSG |
| | | YNFSLSAAVKAGACMLDGGNMLETLKVTPQNLEDILASML |
| | | KVKRAHSMFVSDTPGDRNPYENLLYKVCLSGNGWPYIACR |
| | | TSLTGRAWDNTVVDLGPPIDLSQNKQMSPAKPKGAGHGMP |
| | | SGLTMSQILALKDLMAAVDPNAKTWIDIEGRAEDPVEIAFY |
| | | QPQTGAYIHFYREPTDAKQFKQDSKYSHGIDIGDLFNVQPG |
| | | LTSAVLELLPPNMVLTCQGSEDIRRLLDSQGRKDIKLIDVLM |
| | | SKSEARKFEDEVWDKFGFLCKIHTGHVVEKKKRGNKEEITP |
| | | HCALLDCLMYEAASTGRFSPGSIRAVLPRDMVFRAVTEKVA |
| | | L |
| 71 | Amino acid sequence of Z | QCQAVHAKVVIVTSNKTPTLKPAALAKLWPHACCIWNDVC |
| | protein of IPPV | SVPCVFGLILDGLLFVSALVLSHAGLGDGLAIWRDCWRVLV |
| | | GVVVAGLV |
| 72 | Amino acid sequence of L | MEESLRETKLLISRYLRQDERIARQKLAFLGQSEPRSLLIEGL |
| | protein of IPPV | KLLSLCIEIDSCDTNCCTHNTEGQSVENFLFQNHILCPSLPLV |
| | | VPDGMKLNGNILIILECFVRSNPTNFQQKYQEDSVKLDSLKG |
| | | DLERAGISLIPIIDGRTSYYNSLMEEWVCDQFRHNLFKLLEFE |
| | | QENNALFEESEYLRLCESLNVSGGRASGAQGLHSLLDCRGE |
| | | HYNEILKACHIGIDPSIGGVELKGQIENLYQVFRQKLKKGVI |
| | | KHQFRKVDQKSLLKEYCEMYKGIGICGVEETTVDALAAELP |
| | | NISPILRYIHLRIDSESNAEVNEISNLPTGLRSAFNKVKSLKVL |
| | | NTRRKLLLLIDTIILMSHCYVRELFPTLCERDWLGSSFFSVGD |
| | | RLVSVGAIQHDLSKWLKRRLKANGGVGQKSTELHKMINTM |
| | | IQKSSKALGDVGLSFESYGVSFDFLNKVGLEEIMRFKIVGVT |
| | | PTISYIKTNQQPPIPLREFSAEDDSDLKMLSSLSLSLVNSMKT |
| | | SSTVKTRQNAMGRERYRVVQCKECYYQELGNEYRDLVLL |
| | | YQKTGEGSKCYSVNSKRVGEICSFYADPKRYFCPIFSENVIT |
| | | KVIDTMMTWLMGIVELEDSLRDIKKLTKMILLVILCQPSKRS |
| | | QKLLQNLRYFIMAFVSDYHHVELFDKLREELITDAEFFLFKL |
| | | LGKILTILLNDEVSTMLNNRFKFILNISYFCHFITKETPDRLTD |
| | | QIKCFEKYLEPKIQFGSLTVNPKETPTDEEKDDILHGVNMFL |
| | | SKKTCDEVDDPPSKKPGVSKKVFSLMLSAFNSGLLFKESEL |
| | | KKGMKDPLEDSGSATALDLASNKSVVINKYTKDGRVLDYN |
| | | YDKLVSVAVCQLSEIFSRKGKYLLNKEDYDYKIQEVLSSLVI |
| | | GSSKSEQPEEILDVDSDYMDQLKASVERVLDQYKPNRGVRS |
| | | QNNDKSVNDLKIIVEDELSRRLILGELSYHLVEDFDKGLLSE |
| | | NFYKEVCEKAFNNKDFRTKYFYDSEAGLCPIEKMTQALATR |
| | | TYMSGEYFHCFKSLLLQMDANKLSGKYSHYKSQNLNFRFD |
| | | HGRLMDDSRISERESNSEALSKALSLVNCLTSALKNLCFYSQ |
| | | ESPSSYTETGPDTGRMKFSLSYKEQVGGNRELYIGDLRTKM |
| | | FTRFVEDYFESYTKQLEGSCLNNEKEFEKAILGMKLGVSLA |
| | | HASYSLDHSKWGPMMCPFLFLMLYRNLSPKLKGTEVELKG |
| | | CDNISTILSWHIHKLVEVPFNVVTAMMRSYIKRKLGIMKDTS |
| | | QTITESLFFSEFERGVIPSHFSSVLDMGQGILHNTSDFYGLISE |
| | | RFINYALRLVSGNPIEAYTSSDDQISLFSHKFTELMDTDPEEF |
| | | LIYLEFHNYLSSLLNKFISPKSVVGRFVAEFKSRFYVWGDEV |
| | | PLLSKFVAASLHNIKCKEPHQLAETVDTIIDQAVANGVPVSV |
| | | CNEVQKRTLRLLEFSKYPIDPFLLHSDSDVKDWVDGNRGYR |
| | | IMRVIEQTLPEGTASVRSLLRILYNKLKSNELHEEFASAYLSQ |
| | | NRSETLVGLAELMGVKPPSTEDLMICWLNLTACHPLRMVL |
| | | RQKVIYPSALNLEEEKVPTLIRTLQNKLSSGFTRGAQKLLSE |
| | | AVNKSAFQSSIASGFVGLCKTLGSKCVRDPERESHYIKSIIQY |
| | | LQTHCNVKPLNKGHLNLWVYESKTDDTQSASVKPWQIELL |
| | | RPLLWDYLCIALSTSLEIGPWVLGEPVFKVKSDFWKPRPCD |
| | | YFPLRPAHNRILEDRIGMNHIIHAVRRLYPEMFEKHLLPYMS |
| | | DLAAMKLKWSPRIKFLDLCVTLDVNCEALSLISHVVKWKR |
| | | EEHYIVLSDDLLVSHDRKHTTLMDETVVSTSDVADNFLKQI |
| | | YFESFVKPFVATSRTLGSFSWFPHRSSLPQGEGIERLGPFSTFI |
| | | EKVVFKGIERPMYRYDLFMGYSWLDYEIELAHLNQSQLIAS |
| | | GLTEESCFEDVDQFWHYLSTLKVGSVKLSKTVRLTQKTQG |
| | | KLQGQKFSVHLNFTGFITNSCTFVPKQLEVLYSGPVDEHFVI |
| | | DCWSLLKSDREFKAGASEWFVHSDVVDAYISTASPSSEAYP |
| | | LDVWLEPDLLELSVSDISKVGPEVNIVPLVVEDGHLLELKEK |
| | | VAIINPVILDQDIEVFINELKEDHWDLLVCKFADILKHRQCC |
| | | NLYLINVDILTIALRILNDKAEEFISKSMQEIDQWFDFKGYSL |
| | | CFSKSRRQVMRHSSTGTMRLKGRLCQPAFYVEVVEEID |
| 73 | Amino acid sequence of | MGQLVSFFQDIQLFFQEALNVALAVVTVLAIIKGLVNLWKS |
| | glycoprotein precursor | GLFQFLFFLILAGRSCSFRIGHHTTFESVTMSVGGVFHELPAL |
| | (GPC) protein in Amapari | CRINNSHSLIQLSHNSSLALSVEYVDLCVVLESDQYLVAGD |
| | virus (AMAV) | YSNCTGEATGYNWVIDWTLKGLGHGLEGDPKLHCQPKRST |
| | | NAEFTLQLNISRRHTNDHYRERIETGIRHMFGPFKILTKEGK |
| | | DCVILRNTTWKEQCVKSHYNTLAFLLKNTANSLPKRRPLAF |
| | | FSWSLSDSSGNDMPGGYCLEEWMLIAAKLKCFGNTALAKC |
| | | NLNHDSEFCDMLKLYEFNKNAISKLNNQTREAVNALTHSIN |
| | | SLISDDLLMKNKLREFLKVPYCNYTKFWYVNHTKSGEHSLP |
| | | KCWLVNNGSFLNESEFRNEWILESDHLIAEILSKEYQDRQG |
| | | KTPITLVDMCFWSAIFFDNKSLLHLVGFPTHRHIVGEACPLP |
| | | HKINRHGACACGLYQKLKKKTAWRKRHQ |
| 74 | Amino acid sequence of | MGQLVSFFQDIQLFFQEALNVALAVVTVLAIIKGLVNLWKS |
| | GP signal peptide in | GLFQFLFFLILAGRSCS |
| | AMAV | |
| 75 | Amino acid sequence of | FRIGHHTTFESVTMSVGGVFHELPALCRINNSHSLIQLSHNSS |
| | GP1 protein in AMAV | LALSVEYVDLCVVLESDQYLVAGDYSNCTGEATGYNWVID |
| | | WTLKGLGHGLEGDPKLHCQPKRSTNAEFTLQLNISRRHTND |
| | | HYRERIETGIRHMFGPFKILTKEGKDCVILRNTTWKEQCVKS |
| | | HYNTLAFLLKNTANSLPKRRPL |
| 76 | Amino acid sequence of | AFFSWSLSDSSGNDMPGGYCLEEWMLIAAKLKCFGNTALA |
| | GP2 protein in AMAV | KCNLNHDSEFCDMLKLYEFNKNAISKLNNQTREAVNALTH |
| | | SINSLISDDLLMKNKLREFLKVPYCNYTKFWYVNHTKSGEH |
| | | SLPKCWLVNNGSFLNESEFRNEWILESDHLIAEILSKEYQDR |
| | | QGKTPITLVDMCFWSAIFFDNKSLLHLVGFPTHRHIVGEACP |
| | | LPHKINRHGACACGLYQKLKKKTAWRKRHQ |
| 77 | Amino acid sequence of | MANSKEIPSFRWTQALRRELGSFTEPTKGSVLKDAKLIADSL |
| | NP protein in AMAV | DFTQVSQVQRLLRKTKRTDADLDKLRDLNKEVDKLMSMK |
| | | SAQRNTVLKVGDLGKDELMDLASDLEKLKRKIGERPNGGP |
| | | RLYMGNLSQSQLDKRSDILRSLGFQQQRGPNQGIVRLWDVS |
| | | DPSKLNNQFGSMPALTIACMTVQGGETMNNVVQALTSLGL |
| | | LYTVKYPNLDDLEKLTVEHDCLQIITRDESALNISGYNFSLS |
| | | AATKAGASLIDGGNMLETIKVTPDNFSSIIMATLKVKKREG |
| | | MFVDEKPGNRNPYENLLYKLCLSGEGWPYIGSRSQIVGRSW |
| | | DNTSVDLNTKPTVGPRGPERNGQNMRLSNLSELQEAIVREA |
| | | MQKLDPSNTIWMDIEGPPTDPVELAVLQPSTGYYIHCYRKP |
| | | HDEKGFKNGSRHSHGILLKDLEDAQPGLLSYIIGLLPQNTVI |
| | | TVQGADDIKRLFDIHGRKDLKLVDVRLTGEQSRIFEQEVWE |
| | | RYGELCKAHNGVIVPKKKHKDNGPQKEPHCALLDCIMFQS |
| | | VLDGHLPELSLKPLLPGSLVYQARNAFVM |
| 78 | Amino acid sequence of Z | MGNCNVKQETQPQSTRPKTTSTETELLRTPPVSLHGRYNCK |
| | protein in AMAV | CCWFADKNLVVCSDHYLCLRCLNLMLRTSDLCNICWKPLP |
| | | TRIAIPVEPSAPPE |
| 79 | Amino acid sequence of L | MDEKINSLKDFVRKQVPEIPELSYQRELLLSQVEMGMILME |
| | protein in AMAV | GFKLLSCLVEIESCKKNSCEHNSSQKFVDVILSDNGVVTPTL |
| | | PKVIPDGFRFFNKTLILLETFVRVNPEEFEKKWKRDMSKLLT |
| | | LKEDVQKAGITLVPIVDGRCNYNTNLMPDWATERFRWLLI |
| | | DLLRESRGDSKIDIEEQEYQRLVHSLSKTGNQSLGFENIECL |
| | | KRHCLNYESRLDESLLTGFNNDLRESKIREGLIKMKNWYRK |
| | | EVFVKGMGNFVKTDKAKLLQSLESLGLHANSGTSECPFCCC |
| | | KILDICYKLMQKLKHGHSLSEGIPDEFIAKSQIEKEYLLVLSV |
| | | CNKIKGKKVFNTRRNTLLFLDLIMLNFVIDVFENNPTELCFL |
| | | KESGLIIGQMLLFSNDRVLDILSARKLLKKKLEISAHWVKKC |
| | | NStLKRAEPDLWDYVSKYITEPKFDSLTSLAEELCTERPVMR |
| | | YKVQIHSGDGCSHKEFETLSEQQQICLFKCLSHVSLSLTNSM |
| | | KTSFSSRLLVNEVDHKKYFGTVRLKECYVQKFFLTNELYGL |
| | | LFYQKTGERSRCYSLYLSDKGQLKEVGSFYCDPKRFFLPIFS |
| | | DTVLLLMCAEMVSWLDFCEELAREVDPLLRLLVLSILCSPS |
| | | KRNQTFLQGLRYFIMAFVNQAHHVQLMSKLVVECKSASDV |
| | | LIQRLSVRMFRMVLDFGSDPDAFMSRKFKFLLNVSYLCHLV |
| | | TKETPDRLTDQIKCFEKFLEPKLEFGFFVVNPSLNGTLTKEQ |
| | | EDAMVGGVSKFFSKDIFNIEDMKQPGVSRDLLSYCLTLFNK |
| | | GKLKVNGSLKVNPFRPSFTSTALDLSSNKSVVIPKLDELGNI |
| | | VSVYDKQKLVSTCVASLVERFKTKGKFNLDPNEIEFLIMDN |
| | | LTNLLAIKGSAVKEREELSMLYEQLSDDAIKAFEELRQDVEF |
| | | TLGRMRTPEKKKKTTNFYGNCTLESLWAPFNVMKAIRTETS |
| | | IHEIRDFDPNILPPEIYEELCTSVFESSLKESFFLNEVLDICPLE |
| | | LLLKNLTTRCFEEQEFFDCFKYLLIHAGFDQRLGTYEHKSKS |
| | | RLGLSEDVFKLRDDVRMSQRESNSEAIARRLDKSFFTSAAL |
| | | RNLCFYSEESPTEYTCISPNTGNLKFGLSYKEQVGSNRELYV |
| | | GDLNTKMMTRLVEDFAEAVAKSMNYTCLNSEKEFEKAICD |
| | | MKMAVNAGDICCSLDHSKWGPFMSPALFLSFINELKLKDHE |
| | | TSALIDCRPVLSVLRWHLHKAVEVPFNVAEAYCTGMLKRR |
| | | LGLMSLQSQSVSEEFFHQQLLMGKEVPSHIMSVLDMGQGIL |
| | | HNLSDLYGLITEQFLNYCLDLLFDVVPISYTSSDDQITMIKFP |
| | | TTNAPEGGESQSDWLEVLCFHDFLSSKLNKFVSPKSVCGSF |
| | | AAEFKSRFFVMGEETPLLTKFVSAALHNVKCKTPTQLAETI |
| | | DTICDQCVANGVGVTIVGEISKRVNRLIKYSGYPQTPFLAVE |
| | | VQDVKDWVDGSRGYRLQRNVENCLSDHPQLELIRKSAKKV |
| | | LTKIKRGLIFEEHLVQLIGKGGDNAMEAFLSYIDCSEIEKREA |
| | | LRYRWLNLSSNGDLRLVLRTKLMSARRVLEKEQIPTLIKTL |
| | | QSKLSKNFSRGAKKILAESINKSAFQSSVASGFIGFCKSMGS |
| | | KCVRDGSGGFLYIKDVISKVKICSCDICSLAPGIVFCDEALEN |
| | | VSMFSRPILWDYFSLVLTNACELGEWVFSCVQIPPKPTLLSN |
| | | PNLFWAVKPRGVRLVEDQLGLNHVLQSVKRNYPKIFEEHL |
| | | VPFMSDLQVSRTTDFTKLKYLDVCIALDMMNENLGIISHLL |
| | | KGRDNSLYIVKQNECASAHVRQVEYVDYDVGLSPQQICSNF |
| | | KIQLTFSSFINPLVMTTSTLRSFFWFGEVLRLEDENQIDVGEL |
| | | TDFVLLIKKYNVDRAMMLDDLTMGFVVSEIGEPKFRLLDFE |
| | | WSGVEEQTSFPLSENSNNNEIKFTLNLQLEHKRLSTKYRLTR |
| | | LVVYSYTMVCVMLVNDSRGVLKVENLTLRASGDVKEHRF |
| | | LDGVTLVSHHPTLCGKRGINILDLFRDAELPIPETRMFPEEVF |
| | | LDLSDYQSEVEDKYAYEIVGPEFSDVPLVMSGGCLVVGDK |
| | | KLSHLLTELTGNVILKALGALETDGEIGSFLMGLWPYIKATK |
| | | QRVKISQEEFLFIYETHRRSLLMSFEAYNDWLEFLDFSVCFS |
| | | KTLGDLVVSDSSGNMRLRGVVCRPLRQVGTVMEIE |
| 80 | Amino acid sequence of | MGQVVTFFQSIPEIIQEAINIALIAVSVICIIKGCVNLWKCGLI |
| | glycoprotein precursor | QLMVFLLLAGKRCDALNIDRRHVLSSVELNLTRMFDNFPQS |
| | (GPC) protein in Flexal | CSKNNTHHYYKGPEGTNWGIELTLTNTSVANYTSMNRIRSL |
| | virus (FELV) | AFGNITNCDKTGEAGHTLKWLLNELHFNVLHVTRHVGARC |
| | | MTTEGAGLLIQYNLTIGDHGGEVGRHLIASLAQIIGDNKAA |
| | | WVGKCDSRCSNDGKCNYTNCEGYTHYNYLIIQNTTWAQH |
| | | CTYSPLPSIRMALNKVAYSSVSRSLLGFFTWDISDSSGNHVP |
| | | GGYCLEQWAVVWAGIKCFDNAVMAKCNKEHDVEFCDTM |
| | | RLFDYNQNAIKTLQLNTENAVNLLKRSINGLISDSLVIRNSL |
| | | KQLARIPYCNYTKFWYINDTVSGKHSLPQCWKVHNGSYLN |
| | | ESQFKNEWLLESDHLYSEMLLKEYEERQGRTPLALTDICFW |
| | | SLVFFTSTVFLHLVGIPSHRHIVGDACPKPHRITKNALCSCGY |
| | | YNLPGKQVRWVRKGK |
| 81 | Amino acid sequence of | MSDSNIPAFRWTQALRRGLSNWTQTVKADVIKDAKAIMSA |
| | NP protein in FLEV | LDFNQVAQVQRMMRKDKRSEADLTRLRDMNKEVDALMT |
| | | MRSVQRDVVLKIGGLSKDELLELSSDLEKLRKKVMRAEGSS |
| | | TPGVYQGNLTTSQLQQRADLLKLVGMKPLQQSRGGVVKV |
| | | WDVKDSSLMINQFGSMPALTIACMTEQGGEQMNDVVQGL |
| | | TALGLVYTVKFPNLDDLEKLTEQHPCLKLITQEQSQINISGY |
| | | NLSLSAAVKAGACMIDGGNMLETIKVSPSMFSTLIKTVLQV |
| | | KNREGMFIGNAGPQRNPYENLLYKICLSGEGWPYIGSRSQV |
| | | SGRAWDNTSIDIEGKPSPNHPPVRNGGTPQINPLSRDQEDQV |
| | | KGAVRLLDPKVTTWVDIEGPPGDLVEFAIFQPNSGKYLHCY |
| | | RRPHNEQSFKDQSKFSHGLLLKDLESAQPGLVSAIIRALPEG |
| | | MVLTAQGSDDIEKLFLMHGRRDLKVVDVALTSEQARVYED |
| | | TVWERFNPLCKKHKGLVIKKKKKGAAPTSTNAHCALLDCI |
| | | MFDATITGYIADAKPQQLLPIDLLYRTENLIHL |
| 82 | Amino acid sequence of Z | MGLRYSKAVRDRYGERETVGRVPMTLNLPQGLYGRFNCKS |
| | protein in FLEV | CWFANKGLIACSDHYLCLNCLTRMLSRSEFCEICNRPLPTKII |
| | | FEESPSAPPYEP |
| 83 | Amino acid sequence of L | MDETLNEMRDLIRKWVPDEPEFIEQKASSLSQVHLRAVVIE |
| | protein in FLEV | GLKLLSLLVEVDSCKKNRCIHNRSKTVNAILREYKMVAPTL |
| | | PDLVPDGYLVTGDIVVLLEAFVRVNQSSFEVKYNHDFGKL |
| | | MMLSQDLSKVGITLVPVVDGRSNYYVDYIPDWVIERLRWLI |
| | | ITIMKQLKDDGEDIEEVEYERLVCSLSTMENQGLGLESLTQ |
| | | MRECGASYKQRLESVLSLGVNGQLSVSDCKTAILKLFTEYQ |
| | | TLKEQGYLAESFKSTDRLELQEALRSHSLIEHGNLGASPHCE |
| | | LCQNHMIEVLTKLKGSKSSSNTKLVSQEVSEYFSLLSVCNKI |
| | | KGQKILNTRRLTFLSLDVIMFNKFLQIIKKDCTQDVHFLVGG |
| | | CLRSVNDRLVCPDLIVKAYERKMISSPKWLTKVDQKLVHG |
| | | LPEPLRQNYELQVQPLLTELDLETWAEYYDSYRENWGNKP |
| | | SINYNAIATPCNCEENDRLDYVNLSDESFLQYLEALSTLSLG |
| | | LVNSMKTASTTKLTVNQPDNYYGFVHCNECYYQEFQEAYR |
| | | SVLLYQKTGEKNRCYSIFKTVGGGDSEEHLASFYCDPKRFF |
| | | LPIMSSDVIHSMACEMLSWLDFMSDSDKRKVSCNLRKLLLC |
| | | VMCTPTKRLQTYLQGMRYFIMAYVNELHHVQLLNKLKIVA |
| | | KSKAEFHTMCLTDDLILSVLTSSDEVNMTKAFKFILNVSYLC |
| | | HLITKETPDRLTDQIKCFEKFMEPKLNFDSVLINPSMSLHLEP |
| | | KQEDKFLNDMTRLLSKDVKGAQGSDPGTDPLLMSICSSLFN |
| | | HGELGLPNKLSRDPQSPSFTSTALDLSSNKSVVVPKLNELGE |
| | | PITTYDYQTLVSSVVVELSESFKNKLQYKLDRKSLVYKIYDR |
| | | LMGLVSNKVKHPIDEPFDSEDDILDSVSDEVKDVILKIESDV |
| | | TSCLSRMESSKCNHGCEKKVGTGKADHNPLDSLWSEEVRM |
| | | RVNIETSHHEVKDFDFNTFPPETYEELVQIVFESRFKELYFTE |
| | | RVFSPCPLEMLLRNLTRKYYEEQDFFECFKYILVSTGYDNR |
| | | VGRYDHKKINRLGFKEPALNISEVVRISTRESNSESILKRLDK |
| | | SFFTNSSLRNLCFYSDESATERSCVGTNIGRLKFGLSYKEQV |
| | | GGNRELYVGDLNTKLTTRLIEDYFESIVGDMRYSCLNNEKE |
| | | FEKALLDMKAIIRQSGFVVSMDHSKWGPHMSPVIFSQFLRL |
| | | LKLSLLDGSVIDNRPILELLNWHIHKMVEVPFNVVRAYMKG |
| | | YIKRCTGVMEKNSMTMVEDFMHKQFETGVVPSHISSVIDM |
| | | GQGILHNVSDFYGLVTEQFINYCIKLCYDTPCLSYTSSDDEIL |
| | | MSSSFILKKNDGELDVELAKDILDFHDFLSRGLNKFVSPKTV |
| | | AGTFACEFKSRFFIWSQEVPLLTKFVAAALHNVKAKAPNQL |
| | | AETIDTILDQCVANGVSIEVVGRIAKRTNALLRYSGHPYNLF |
| | | LCLEETDVKDWVDGSRGYRLQRSVENVFPDDEVPGIVRAA |
| | | ARKVFHLIRSGTIEEEYLVSTIQTDPDDCLRRILEIADVTNEQI |
| | | ERILDFRWLNLRAHGDYRMVLRTKLMNSARIIEREEIPSLIK |
| | | SVQSKLSKNFVRGAKKIITDAVNKSAFQSCIASGFVGVCKS |
| | | MGSKCVRDGKGSFLYIKDVLKDIIKHVNCHSCRNYCNIYCR |
| | | EALKEVSEYSRPLFWDYFALVLTNACELGNWVFSKAVLPK |
| | | SVYKLDNPSQFWLCKPSSHTELEDKVNLNHVLFSIKRNFPSL |
| | | FEEHVAPYLSDLNTLKISWVQRIKFLDICVAVDMTSESLGIIS |
| | | HMIKRKREELYVVKQNEQSMSHLREASTFEEGLQLNSYEIC |
| | | YNFLLQILFESMLTPVLLTTSQLKKYFWYGEVELLPNTEPHE |
| | | LQQLTQFVMDCKMLNISKAMTIDDLDLGFVQSTMKMTDV |
| | | NLNLSTFLTKVDWANRYLYETFESMFIESPDSEFSMELVLVF |
| | | SHIRKSYKHKYEHTTTYTVKASFVLETSLFSDQDDQDVLVIP |
| | | VKDVECFVSNSPGNHLQLDGAGLIPLVPVVSGKEVLNFDLL |
| | | LKDQDVSFSGTSPHLSKVRLDFSAHIKELKNKFSYKIIGPEM |
| | | GFTPLHLDKGIIKEGDRIVSKLNVNVTSKSLFMALGLLSNDK |
| | | VSEFLESLFYYLKSSGKTGALLSMTTSDLQNLVDNYNEDFK |
| | | QILKRESDWVSFGAFKLAYSNSLSAIMIQDERGPYRLKGLSC |
| | | EKLLKSHDERVEID |
| 84 | Amino acid sequence of | MGQLISFFQDIPIFFEEALNVALAVVTLLAIIKGIVNVWKSGI |
| | glycoprotein precursor | LQLFVFLVLAGRSCSFKVGHHTNFESFTVKLGGVFHELPSLC |
| | (GPC) protein in Guanarito | RVNNSYSLIRLSHNSNQALSVEYVDVHPVLCSSSPTILDNYT |
| | virus (GTOV) | QCIKGSPEFDWILGWTIKGLGHDFLRDPRICCEPKKTTNAEF |
| | | TFQLNLTDSPETHHYRSKIEVGIRHLFGNYITNDSYSKMSVV |
| | | MRNTTWEGQCSNSHVNTLRFLVKNAGYLVGRKPLAFFSWS |
| | | LSDPKGNDMPGGYCLERWMLVAGDLKCFGNTAVAKCNLN |
| | | HDSEFCDMLRLFDFNKNAIEKLNNQTKTAVNMLTHSINSLIS |
| | | DNLLMRNKLKEILKVPYCNYTRFWYINHTKSGEHSLPRCW |
| | | LVSNGSYLNESDFRNEWILESDHLIAEMLSKEYQDRQGKTP |
| | | LTLVDLCFWSAIFFTTSLFLHLVGFPTHRHIQGDPCPLPHRLD |
| | | RNGACRCGRFQKLGKQVTWKRKH |
| 85 | Amino acid sequence of | MGQLISFFQDIPIFFEEALNVALAVVTLLAIIKGIVNVWKSGI |
| | GP signal peptide in | LQLFVFLVLAGRSCS |
| | GTOV | |
| 86 | Amino acid sequence of | FKVGHHTNFESFTVKLGGVFHELPSLCRVNNSYSLIRLSHNS |
| | GP1 protein in GTOV | NQALSVEYVDVHPVLCSSSPTILDNYTQCIKGSPEFDWILGW |
| | | TIKGLGHDFLRDPRICCEPKKTTNAEFTFQLNLTDSPETHHY |
| | | RSKIEVGIRHLFGNYITNDSYSKMSVVMRNTTWEGQCSNSH |
| | | VNTLRFLVKNAGYLVGRKPL |
| 87 | Amino acid sequence of | AFFSWSLSDPKGNDMPGGYCLERWMLVAGDLKCFGNTAV |
| | GP2 protein in GTOV | AKCNLNHDSEFCDMLRLFDFNKNAIEKLNNQTKTAVNMLT |
| | | HSINSLISDNLLMRNKLKEILKVPYCNYTRFWYINHTKSGEH |
| | | SLPRCWLVSNGSYLNESDFRNEWILESDHLIAEMLSKEYQD |
| | | RQGKTPLTLVDLCFWSAIFFTTSLFLHLVGFPTHRHIQGDPC |
| | | PLPHRLDRNGACRCGRFQKLGKQVTWKRKH |
| 88 | Amino acid sequence of | MAHSKEIPSFRWTQSLRRELGMFTEPTKSSVLNDAKLIADSL |
| | NP protein in GTOV | DFTQVSQVQRLLRKSKRGDTDLDKLRDLNKEVDRLMSMKS |
| | | VQNNTVLKVGDLGKDELMDLASDLEKLKKKIGDRESNSPR |
| | | MYMGNLTQSQLEKRAGILRTLGFQQQRGAAGGVVRLWDV |
| | | SDPSKLNNQFGSMPALTIACMTVQGGETMNNVVQALTSLG |
| | | LLYTVKYPNLDDLEKLTLEHDCLQIITKDESALNISGYNFSLS |
| | | AAVKAGASLIDGGNMLETIKVTPNNFSSIVKAALNVKRREG |
| | | MFIDERPGNRNPYENLLYKLCLSGEGWPYIGSRSQILGRSW |
| | | DNTSVDLNARPVTGPRAPEKNGQNIRLSNLSEMQEAIVKEA |
| | | MRKLDSSDTIWMDIEGPPTDPVELAVFQPSSGNYVHCFRKP |
| | | HDEKGFKNGSRHSHGILLKDLEDAQPGLLSYVIGLLPQGSVI |
| | | TVQGADDIKKLFDIHGRKDLKLVDVRLTGEQSRIFEQEVWE |
| | | KFGHLCRAHNGVIVPKKKNKEANSTKEPHCALLDCIMFQSV |
| | | LDGHLPDTIPIQLLPNTLVFQAKSAFVM |
| 89 | Amino acid sequence of Z | MGNSKSKSNPSSSSESQKGAPTVTEFRRTAIHSLYGRYNCKC |
| | protein in GTOV | CWFADKNLIKCSDHYLCLRCLNVMLKNSDLCNICWEQLPT |
| | | CITVPEEPSAPPE |
| 90 | Amino acid sequence of L | MDEKVFVLKDFIRRQVPDIPELSYQKEALLSQVEVPMVLTE |
| | protein in GTOV | GFKLLSCLVEIESCRKNSCECNFEQKFVDTILSENGVVAPTLP |
| | | KVIPDGYRFFNKTLILLETFVRVNPEEFEKKWKTDMAKLLS |
| | | LKEDIHRTGITLVPVVDGRGNYNTDLLPDWATERFRWLLID |
| | | LLRESRGAPTMEIEDQEYHRLIHSLSKTSNQSLGFENIECLKR |
| | | VHLNYEERLNEQLLKDIVGEVRESKIREELIKLKTWYREEIY |
| | | RKGLGNFVQTDRKSLLQTLVLSSAHSDSLAPECPMCCSKIL |
| | | DLCYQLSMRIANQTSLENNFDEPPLPTTQIEKVYLSLLSACN |
| | | KIKGKKVFNTRRNTLLFLDLIILNFVAHVYKTQPSEMETLKK |
| | | AGLIIGEMLLLPNDRVLDILVARRLLLKKVESCCNWLDRCR |
| | | HLLRKEEPVLWDCVSEFTNVPDFELLLSLAEELCSEKPVMH |
| | | YKPPSSLIGDCAHKDLMSMSDGEFESLFKCLSHISLSLVNSM |
| | | KTSFSSRLLVNEKDYKRYYGTVRLKECYVQRFFLRVGLYGL |
| | | LFYQKTGEKSRCYSLYLSDKGNLVELGSFYSDPKRFFLPIFS |
| | | EFVLLATCAEMLSWLDFDEKLVDAVTPLLKILVLSILSSPTK |
| | | RSQTFLQGLRYFIMAYVNQAHHIQLMSKLAVECKSASDVLI |
| | | QRLSVKIVDMVLSDGSDPDMHMTRKFKFVLNVSYLCHLIT |
| | | KETPDRLTDQIKCFEKFMEPKLEFGSLIVNPSLNGFLSKEQE |
| | | DVMIEGVEKFFSKELLTVEDLKRPGVSRELLSYCVSLFNKG |
| | | RLRVNGTLGTDPYRPSFTSTALDLSSNKSVVIPKLNEVGEIV |
| | | SEYDKQKLVSTCITSMAERFKTKGRYNLDPDTIDFLIMRNLT |
| | | NLLSARKLDSSKKEELSLLYEHLSEDVMKAFEEIKYEVEITL |
| | | SKMRLSRELECGHKKPCTLEGVWAPFNVLKVIRSETSVHEI |
| | | RDFDPDLLGEDVYEKLCVAVYDSPLRPTFFLEKPLDICPLEL |
| | | LLKNLTTKSYEDDEFFDCFKYILIQAGFDQRLGAYEHKNRS |
| | | RLGLSEEAFRLKEDVRVSNRQSNSEAIADRLDKSFFTSAALR |
| | | NLCFYSEESPTEYTCISPNVGNLKFGLSYKEQVGSNRELYVG |
| | | DLNTKMMTRLVEDFTEAVANSMNYTCLNSEKEFERAICDM |
| | | KMAVNNGDLCCSLDHSKWGPFMSPALFHAFFGALKFKISK |
| | | TGEQVDLGPVLNVLKWHLHKAVEVPISVAEAYCTGMLKRR |
| | | LGLMSLSCQSVCEEFFHQKLLLEEGVPSHIMSVLDMGQGIL |
| | | HNSSDLYGLITEQFINYCLDFLFDVIPVSYTSSDDQITTFKLPT |
| | | MSSSEDGLDGFDWLELLCFHDFLSSKFNKFVSPKSVSGTFV |
| | | AEFKSRFFVMGEETPLLTKFVSAALHNVKCKTPTQLAETIDT |
| | | ICDQCVANGVGIEIVTKISERVNRLIRYSGYPQTPFLAVEKQ |
| | | DVKDWTDGSRGYRLQRNIEHYLQGSEQLEFVRKCAKKVLL |
| | | KIKKGQVFEEYLVQLIGKDGDDALKGFLSYAGCESDEIKDV |
| | | LKYRWLNLSANGDLRLVLRTKLMSTRRVLEREQIPTLIKTL |
| | | QSKLSKNFTKGVKKILAESINKSAFQSSVASGFIGFCKSMGS |
| | | KCVRDGSGGFMYIREVLNKQRVCPCEICAQNPGIIFCSDALT |
| | | LIPEFSRSILWDYFSLVLTNACELGEWVFSSVQPPKVPILLNN |
| | | PNLFWAVKPRGTRLIEDQLGLGHVLQSVRRSYPKVFEEHLV |
| | | PFMNDLQVSRTTDFTRLRYLDVCVALDMMNENLGIVSHLL |
| | | KAKDNSIYIVKQSECAVAHIRQVEYVNQELGLSPQQICSNFK |
| | | IQLVFSSMINPLVITTSVLKSFFWFNEVLNLEDESQIDVGELT |
| | | DFTILIKKYNLNRAMMLDDLTMGYVVSTISEPTIHLVSLKRN |
| | | SNSIVGEQNSEMLHGEQVEDMYSIVLHIQLEHKRHSTKYHL |
| | | SRTVVYSYTVECETNITDIEKEPSLATVKNVVLRASGSIEGH |
| | | QFLDGVNLVASQPIFTGKKVINLSELLADSEnETYKEGDAV |
| | | GSILLNFGTFYEHIDDRYAYEIVGPECSDSPLVLDGGSILADG |
| | | KKLSSIKVELTGDVILKALGALESEKEVQSLLTGLWPFIRINN |
| | | LKVKMAQEDFLLMYEMHRESLLKSLEVFSEWCEFVDFSVC |
| | | YSKSLRDLVISDSSGSLRLKGITCKPINLSNSVTEIE |
| 91 | Amino acid sequence of | MGQVIGFFQSLPEIINEALNIALICVALLATIKGMVNIWKSGL |
| | glycoprotein precursor | IQLLFFLTLAGRSCSHSFTIGRFHEFQSVTVNFTQFMSYAPSS |
| | (GPC) protein in Latino | CSVNNTHHYFKGPQNTTWGLELTLTNESMINITNSMRVFTN |
| | virus (LATV) | IHHNVTNCVQNISEHEGVLKWLLETMHLSISKPGKHIAPVM |
| | | CERQKGLLIEYNLTMTKDHHPNYWNQVLYGLAKLLGSSKR |
| | | LWFGACNKADCQMQSDHQHIKCNYSNCKGYTSFKYLIIQN |
| | | TTWENHCEYNHLNTIHLLMSSIGQSFITRRLQAFLTWTLSDA |
| | | LGNDLPGGYCLEQWAVVWFGIKCFDNTAMAKCNQNHDSE |
| | | FCDMLRLFDYNRNAIQSLNDQSQARLNLLTNTINSLVSDNL |
| | | LMKNKLRELMNVPYCNYTRFWFINDTKNGRHTLPQCWLVS |
| | | DGSYLNETRFRTQWLSESNSLYTEMLTEEYEKRQGRTPLSL |
| | | VDLCFWSTLFYISTLFAHLVGFPTHRHLIGEGCPKPHRLTGS |
| | | GICSCGHYGIPGKPVRWTKMSR |
| 92 | Amino acid sequence of | MGQVIGFFQSLPEIINEALNIALICVALLATIKGMVNIWKSGL |
| | GP signal peptide in | IQLLFFLTLAGRSCS |
| | LATV | |
| 93 | Amino acid sequence of | HSFTIGRFHEFQSVTVNFTQFMSYAPSSCSVNNTHHYFKGPQ |
| | GP1 protein in LATV | NTTWGLELTLTNESMINITNSMRVFTNIHHNVTNCVQNISEH |
| | | EGVLKWLLETMHLSISKPGKHIAPVMCERQKGLLIEYNLTM |
| | | TKDHHPNYWNQVLYGLAKLLGSSKRLWFGACNKADCQM |
| | | QSDHQHIKCNYSNCKGYTSFKYLIIQNTTWENHCEYNHLNT |
| | | IHLLMSSIGQSFITRRLQ |
| 94 | Amino acid sequence of | AFLTWTLSDALGNDLPGGYCLEQWAVVWFGIKCFDNTAM |
| | GP2 protein in LATV | AKCNQNHDSEFCDMLRLFDYNRNAIQSLNDQSQARLNLLT |
| | | NTINSLVSDNLLMKNKLRELMNVPYCNYTRFWFINDTKNG |
| | | RHTLPQCWLVSDGSYLNETRFRTQWLSESNSLYTEMLTEEY |
| | | EKRQGRTPLSLVDLCFWSTLFYISTLFAHLVGFPTHRHLIGE |
| | | GCPKPHRLTGSGICSCGHYGIPGKPVRWTKMSR |
| 95 | Amino acid sequence of | MSGASEVPSFRWTQSLRRGLSHFTTSAKGDVLRDAKSLVD |
| | NP protein in LATV | GLDFNQVSQVQRVMRKDKRSDDDLSKLRDLNRSVDSLMV |
| | | MKNKQNNVSLKIGSLSKDELMDLATDLEKLKRKINLGDRQ |
| | | GPGVYQGNLTSAQLEKRSEILKSLGFQPRANQNGVVKVWDI |
| | | KNPKLLINQFGSIPALTIACMSVQGAEQMNDVVQGLTSLGL |
| | | LYTVKYPNLDDLNKLSKDHPCLEFITKEESANNISGYNLSLS |
| | | AAVKAGACLVDGGNMLETILVKPDNFQDIVKSLLVIKRQEK |
| | | MFVNEKPGLRNPYENILYKLCLSGEGWPYIGSRSQIVGRAW |
| | | ENTTVDLSKEVVYGPSAPVKNGGNMRLSPLSDTQEAVIKEA |
| | | IGKLDMDETIWIDIEGPPNDPVELAIYQPSTGNYIHCFRVPHD |
| | | EKGFKNGSKYSHGILLRDIENARSGLLSRILMRLPQKVVFTC |
| | | QGSDDIQKLLQMNGRPDIATIDMSFSSEQARFFEGVVWEKF |
| | | GHLCTRHNGVVLSRKKKGGNSGEPHCALLDCIIFQAAFEGQ |
| | | VTGQIPKPLLPNSLIFKDEPRVAM |
| 96 | Amino acid sequence of Z | MGSKQSAPPKPLQLPQPRVSLLREAKPSLYGRYNCKCCWFQ |
| | protein in LATV | DKNLVECSDHYLCLKCISSMLKRGKNCEICGKAIPTYIEVGI |
| | | TPTAPQLN |
| 97 | Amino acid sequence of L | MDDIVNQLFDLLRKHFPARPKVTEQITLVTCQNDAKMILTE |
| | protein in LATV | GFKLLSLLVELDSAEANNCTHNSDSLTIEGILRKEGIMSIALP |
| | | RIVPDGFSLYGNVLILLETFVRVNPVSFEQKYNQDMSKLLSL |
| | | KDDLSLCGITLVPLVDGRTNYYNRFVDDWVIERFRWLLLQL |
| | | IKFVRESGEEIEELEYQRLITSLSKLENQSLGFENIEKLPQTGL |
| | | KYRDELKKHMFGNLSSKMKESEIQENLINVLKEFFIKEYKN |
| | | NKSLHKFVFTNRDGLLAKLDQITHHSEHPVDCMSCSSKLYSI |
| | | IDKLGTLKRQPLHSDYHPIYAKMWHSDSLSQAEQIYLKLLS |
| | | QCNKIKSAKLLNTRRNTLLFLDLIMVNFIVHSWKQNPEVLT |
| | | EYRRCGLMAGQLALFSNDRYFDLNELRNKLINKLKNCENW |
| | | IAKCVHQLKKQEFVALDDVLVWATVPDFESLELITTSLELK |
| | | RFKLQYGKDKVDHNEHPIGPLSEETFFRNLNVLSSVCLALV |
| | | NSMKTSFTSKTVINERRASNHFGEVDLIECYCQRFFLSKDLV |
| | | GILSYQKTGEKSRCYSISLISNGELEYIGSFYCDPKRFFLPIFS |
| | | QIVLLNMSREMMLWLADLNLNDSLVGDKLRKLILLIVTNPS |
| | | KRNQTFLQGLRYFIMAYVNQFHHVELMDRLIVPVKSYCESC |
| | | LQRISFDIFRLILEGDYDNEHMTRKFKFLLNVSYLCHLITKET |
| | | PDRLTDQIKCFEKFMEPKLKFESVIVNPSLTENMTEDEEAQV |
| | | LKGVDKLLGKSLSCSTDLTSPGVSKTLLSMCVSSFNRGLLN |
| | | VNGHLRQDPYRPNFTSTALDLSSNKSVVVPKLDELGNPISR |
| | | YDYELLVSSCVTNLAEGFKTKGKFKLDINCQEYTIMRNLTN |
| | | LVLKNEDKSDAKIKGEKPCSFELSQWMETLSEEQLEVLEKL |
| | | KGDVNIALGKLKEKGRSKSNSTLKEGVKRLDSGNTLAGCA |
| | | DPQQVLVNLWSEFGVMKQILVEVSLHEIKDFDPDIIPPQMIQ |
| | | KLVFKVNNSNYKSLFFLDSVINPCPLELLIKNMTTATFDDGE |
| | | LFECFKYLLITAGFDQKLGTYEHKNRSRFGFKFEALKVREE |
| | | GRMSSRESNSEAIARRLDKSVFTNSALRNLCFYSDESPISYSH |
| | | VSPDVGKLKFGLSYKEQVGSNRELYVGDLNTKLMTRLIEDF |
| | | SESVVSNMSYSCLNNEAEFEKAITDMKMCVNLGDMSLSLD |
| | | HSKWGPHMSPVIFAAFLQGLDLKYGPSLCKLNTDPIITLLSW |
| | | HIHKVVEVPYNVIHAYVTGMIKRQLGLMNMSGSTITESFVH |
| | | RLLKEKREPLSHVMSVIDMGQGILHNMSDLYGLVTEQFINY |
| | | AIHFLFDMNTTSYTSSDDQISMIKIGSGMCNFESLKVIEEWET |
| | | ILNFHAFISTKFNKFVSPKTVAGTFAAEFKSRFFVWGEEVPL |
| | | LTKFVSAALHNVKCKTPVQLSETVDTICDQCVANGVSVEIV |
| | | SYICNRTNRLIRYSGFGEHPFLNVENLDVKDWVDGSRGYRL |
| | | QRNIELHLESDGCTSFIRQAARKVFSNIKSGKIVEQALVDLV |
| | | QEDGDKAITGFLRSVGVSEEDIALLCRIRWINLCAHGDLRLV |
| | | LRTKLMSSRRIIETEEIPSLIKSIQSKLSKNFVKGAKKILAESIN |
| | | KSAFQSSIASGFIGFCQSVGSKCVRTGEGGFYYIKELKSKVD |
| | | LYCPCEVCARWKGVTYCSSSCLKIESFTRPLMWDYFSLVLS |
| | | NACELGEWVFEDVEYPKDINFLRNPNLFWLVKPRVSCQIEE |
| | | KLGLTHILQSIRRNYPQLFETHLSPFMSDFQAGRTLGTMTVK |
| | | FLDVCVALDLANENLGIVKHFLKNRRHDIYIVKQDESSQSHI |
| | | RCQKSICVDVELTSTQVCQNFMTQLIMSSLVQPLVLTSSELK |
| | | KFNWFQQVLTLETDEDVDLGLLTDFALQVKKFNVDRAMHS |
| | | EDLSAGYISSTVSVTTFSLSKPIFLQQIDSDFIGGTEDRKDFIQ |
| | | MIKSEFTKNSIDLQFVIQISHVKRALRFNLKRTTVYTLIVRTSI |
| | | LKEVILNSLGQEDQSVELVVDDLELFCSGHDGNHFTLDAAP |
| | | LIVQEPLINGNLKFDLVSRLEEEDLTFSYSESLPSFHFNFEKY |
| | | KHELCNKFSYHLSGPVIVDEPLVLDRGVILHGGRKLTTLQFD |
| | | FSADRIMQALSELESLSSRDLFLFNLWVYSDQTKSKLYIHQD |
| | | KLLLLVESYLSELNSSLARYDSWLNLGNYMICYSKSFKCLM |
| | | ISDTNGRNRLKGILCRRLIEEEVQDIE |
| 98 | Amino acid sequence of | MGQLISFFQEIPVFLQEALNIALVAVSLIAVIKGIINLYKSGLF |
| | glycoprotein precursor | QFIFFLLLAGRSCSDGTFKIGLHTEFQSVTLTMQRLLANHSN |
| | (GPC) protein in Machupo | ELPSLCMLNNSFYYMRGGVNTFLIRVSDISVLMKEYDVSIYE |
| | virus (MACV) | PEDLGNCLNKSDSSWAIHWFSNALGHDWLMDPPMLCRNK |
| | | TKKEGSNIQFNISKADDARVYGKKIRNGMRHLFRGFHDPCE |
| | | EGKVCYLTINQCGDPSSFDYCGVNHLSKCQFDHVNTLHFLV |
| | | RSKTHLNFERSLKAFFSWSLTDSSGKDMPGGYCLEEWMLIA |
| | | AKMKCFGNTAVAKCNQNHDSEFCDMLRLFDYNKNAIKTL |
| | | NDESKKEINLLSQTVNALISDNLLMKNKIKELMSIPYCNYTK |
| | | FWYVNHTLTGQHTLPRCWLIRNGSYLNTSEFRNDWILESDH |
| | | LISEMLSKEYAERQGKTPITLVDICFWSTIFFTASLFLHLVGIP |
| | | THRHLKGEACPLPHKLDSFGGCRCGKYPRLKKPTIWHKRH |
| 99 | Amino acid sequence of | MGQLISFFQEIPVFLQEALNIALVAVSLIAVIKGIINLYKSGLF |
| | GP signal peptide in | QFIFFLLLAGRSCS |
| | MACV | |
| 100 | Amino acid sequence of | DGTFKIGLHTEFQSVTLTMQRLLANHSNELPSLCMLNNSFY |
| | GP1 protein in MACV | YMRGGVNTFLIRVSDISVLMKEYDVSIYEPEDLGNCLNKSD |
| | | SSWAIHWFSNALGHDWLMDPPMLCRNKTKKEGSNIQFNIS |
| | | KADDARVYGKKIRNGMRHLFRGFHDPCEEGKVCYLTINQC |
| | | GDPSSFDYCGVNHLSKCQFDHVNTLHFLVRSKTHLNFERSL |
| | | K |
| 101 | Amino acid sequence of | AFFSWSLTDSSGKDMPGGYCLEEWMLIAAKMKCFGNTAV |
| | GP2 protein in MACV | AKCNQNHDSEFCDMLRLFDYNKNAIKTLNDESKKEINLLSQ |
| | | TVNALISDNLLMKNKIKELMSIPYCNYTKFWYVNHTLTGQH |
| | | TLPRCWLIRNGSYLNTSEFRNDWILESDHLISEMLSKEYAER |
| | | QGKTPITLVDICFWSTIFFTASLFLHLVGIPTHRHLKGEACPL |
| | | PHKLDSFGGCRCGKYPRLKKPTIWHKRH |
| 102 | Amino acid sequence of | MAHSKEIPSFRWTQSLRRGLSQFTHTVKTDVLKDAKLIADSI |
| | NP protein in MACV | DFNQVSQVQRALRKNKRGEEDLNKLRDLNKEVDRLMSMK |
| | | SIQKNTIFKIGDLGRDELMELASDLEKLKNKIKRTESGPQGL |
| | | YMGNLSQLQLTKRSEILKTLGFQQQRGAGNGVVRIWDVSD |
| | | PSKLNNQFGSMPALTIACMTVQGGETMNSVVQALTSLGLL |
| | | YTVKYPNLNDLDKLTLEHECLQIVTKDESSINISGYNFSLSA |
| | | AVKAGASILDGGNMLETIRVTPDNFSSLIKSTLQVKRKEGM |
| | | FIDEKPGNRNPYENLLYKLCLSGDGWPYIGSRSQILGRSWD |
| | | NTSVDLTKKPQVGPRQPEKNGQNLRLANLTEMQEAVIKEA |
| | | VKKLDPTNTLWLDIEGPPTDPVELALYQPANKHYIHCFRKP |
| | | HDEKGFKNGSRHSHGILMQDIEDAMPGVLSYVIGLLPQDM |
| | | VITTQGSDDIRKLLDIHGRKDLKLVDVKLTSDQARLYDQQI |
| | | WEKFGHLCKHHNGVVVNKKKREKDSPFKLSSGEPHCALLD |
| | | CIMYQSVMDGKMVDEEPVALLPLSLLFLPKAAFAL |
| 103 | Amino acid sequence of Z | MGNCNKPPKRPPNTQTSSNQPSAEFRRTAPPSLYGRYNCKC |
| | protein in MACV | CWFADTNLITCNDHYLCLRCHQTMLRNSELCHICWKPLPTS |
| | | ITVPVEPSAPPP |
| 104 | Amino acid sequence of L | MDEYVQELKGLIRKHIPERCEFGHQKVTFLSQVHPSPLLTEG |
| | protein in MACV | FKLLSSLVELESCEAHACQANTDQRFVDVILSDNGILCPTLP |
| | | KVIPDGFKLTGKTLILLETFVRVNPDEFEKKWKADMSKLLN |
| | | LKHDLQKSGVTLVPIVDGRSNYNNRFVADWVIERIRWLLIGI |
| | | LKASKSMLEIDIEDQEYQRLIHSLSNVKNQSLGLENLEHLKR |
| | | NSLDYDERLNESLFIGLKGDIRESTVREELIKLKLWFKDEVF |
| | | SKGLGKFKLTDRRELLESLSSLGAHLDSDVSSCPFCNNKLM |
| | | EIVYNVTFSCVERTDGVATVDQQFSTTHSNIEKHYLSVLSLC |
| | | NKIKGLKVFNTRRNTLLFLDLIMVNLMVDISDSCQDAIESLR |
| | | KSGLIVGQMVMLVNDRVLDILEAVKLIRKKIGTNPNWVKN |
| | | CSKILERSHPEIWHHLSTLIKQPDFNSLISIAQHLVSDRPIMRY |
| | | SVERGSDKICRHKLFQEMSSFEQMRLFKTLSSISLSLINSMKT |
| | | SFSSRLLVNEREFSKYFGNVRLRECYAQRFYLAESLVGFLFY |
| | | QKTGERSRCYSVYLSDNGVMSEQGSFYCDPKRFFLPVFSDE |
| | | VLAGMCEEMTSWLDFDTGLMNDTGPILRLLVLAILCSPSKR |
| | | NQTFLQGLRYFLMAFANQIHHIDLTSKLVVECKSSSEVVVQ |
| | | RLAVGLFIRLLSGESDASLFFSRRFKYLLNVSYLCHLITKETP |
| | | DRLTDQMKCFEKFIEPKVKFGCAVVNPSLNGKLTVDQEDIM |
| | | INGLKKFFSKSLRDTEDVQTPGVCKELLNYCVSLFNRGKLK |
| | | VSGELKNNPFRPNITSTALDLSSNKSVVIPKLDELGNILSTYD |
| | | KEKLVSACVSSMAERFKTKGRYNLDPDSTDYLILKNLTGLV |
| | | SAGPKAKSTQEELSLMYEALTEEQVESFNEIKHDVQVALAK |
| | | MADNSVNTRTKNLGRADNSVKNGNNPLDNLWSPFGVMKE |
| | | IRAEVSLHEVKDFDPDVLPPEVYKELCDAVYKSSEKCNFFLE |
| | | GVLDVCPLGLLLKNLTTSSYVDEEYFMCFKYLLIQGHFDQK |
| | | LGSYEHKSRSRLGFTDETLRLKDEVRLSIRESNSEAIADKLD |
| | | KSYFTNAALRNLCFYSEDSPTEFTSISSNSGNLKFGLSYKEQ |
| | | VGSNRELYVGDLNTKLMTRLVEDFSEAVGNSMKYTCLNSE |
| | | KEFERAICDMKMAVNNGDLSCSYDHSKWGPTMSPALFLAL |
| | | LQMLELRTPVDRSKIDLDSVKSILKWHLHKVVEVPINVAEA |
| | | YCIGKLKRSLGLMGCGSTSLSEEFFHQTMQLNGQIPSHIMSV |
| | | LDMGQGILHNTSDLYGLITEQFLCYALDLLYDVIPVSYTSSD |
| | | DQITLIKTPSLDIEGGSDAAEWLEMICFHEFLSSKLNKFVSPK |
| | | SVIGTFVAEFKSRFFVMGEETPLLTKFVAAALHNVKCKTPT |
| | | QLSETIDTICDQCIANGVSTKIVTRISKRVNQLIRYSGYGETPF |
| | | GAIEDQDVKDWVDGSRGYRLQRKIEAIFHDDKETSFIRNCA |
| | | RKVFNDIKRGRIFEENLINLIGRGGDEALTGFLQYAGCSEQE |
| | | VNRVLNYRWVNLSSFGDLRLVLRTKLMTSRRVLEREEVPT |
| | | LIKTLQSKLSRNFTKGVKKILAESINKSAFQSSVASGFIGFCK |
| | | SMGSKCVRDGKGGFLYIKEVYSGVSACTCEICALKPKIIYCN |
| | | NSLNKVSQFSKPILWDYFSLVLTNACELGEWVFSTVKEPQK |
| | | PLVLNNQNFFWAVKPKVVRQIEDQLGMNHVLQSIRRNYPV |
| | | LFDEHLTPFMNDLQVSRTMDSGRLKFLDVCIALDMMNENL |
| | | GIISHLLKTRDNSVYIVKQSDCALAHIRQSSYTDWELGLSPQ |
| | | QICTNFKTQLVLSSMVNPLVLSTSCLKSFFWFNEVLELEDDS |
| | | QIELAELTDFALMVKNQNVSRAMFVEDIAMGYVVSNFEGV |
| | | RISLSNVMVDGVQLPPQEKAPDIGELFGLKAENVIVGLVVQI |
| | | DHVRMSTKFKLKRKMVYSFSLECIMDVGEIQNKEVILKVVA |
| | | VDQSVSGSGGNHMLLDGVSVVASLPLFTGQASFDLAAMLIE |
| | | SNLAGSNDNFLMRNVTLDLGGFSPELSDKYSYRLSGPENQE |
| | | DPLVLKDGAFYVGGERLSTYKVEFTGDLVVKALGALEDDE |
| | | SVVSMLHQLWPYLKATSQVILFQQEDFTIVHDLYKKQLTKS |
| | | IESFGEWIEFTNFKVAYSKSLKELVISDTQGSFRLKGVMCRP |
| | | LASTPQVEDIE |
| 105 | Amino acid sequence of | MGQLVTLFQSIPEIIEEAVNIALIAVAIMCIVKGTVNLWKCGI |
| | glycoprotein precursor | VQLCIFLLLAGKRCDGFQIDRRHKLESVEFNLTRMFNNLPM |
| | (GPC) protein in Parana | SCSKNNTHHYYKGPEGTNWGIELTLTNESVANYSNMSAIRS |
| | virus (PARV) | LAYGNITNCDKTNEAGHTLKWLLNELHFNVLHVTRHIGAR |
| | | CLTTDSAGILIQYNLTVGDYGGEVGRHLIASLAQIIGDDKAA |
| | | WVGKCFNNCSANGTCRLTNCEGYTHYNYLIIQNTTWENHC |
| | | SYSPMSTIRMALNKVAYSSVSRKLLGFFTWDISDSSGRHVP |
| | | GGYCLEQWALVWAGIKCFDNSVMAKCNKDHNEEFCDTMR |
| | | LFDFNQNAIKTLQLNTENSINLLKRSINGLISDSLVIRNSLKQ |
| | | LARIPYCNYTKFWYVNDTITKRHSLPQCWLTYNGSYLNETH |
| | | FRNDWLLESQQLYNDMLVKEYEERQGKTPIALTDICFWSLV |
| | | YFTVSVFLQLVGIPSHRHIVGQGCPKPHRISRNGLCSCGYYN |
| | | IPMKPVRWVRKGK |
| 106 | Amino acid sequence of | MSEKQVPSFRWTQALRRGLSNWTEPVKVDVIKDARAIISAL |
| | nucleoprotein (NP) protein | DFNQVAQVQRIMRKEKRTDSDLTRLRDMNKEVDALMSMR |
| | in PARV | STQHNVVLRAGGLSKDELLELSADLEKLRKKVIRAEGGNPG |
| | | VYQGNLTATQLNQRAELMKLVGMGPGLRSGNGVVRVWD |
| | | VKDSSLMINQFGSMPALTIACMTEQGGETMNDVVQGLSAL |
| | | GLVYTVKFPNLDDLEKLSEQHPCLKSITQEQSQINISGYNLSL |
| | | SAAVKAGACMIDGGNMLETIKMSPPMFSSIIKAVLQVKNRE |
| | | QMFVGSVGVQRNPYENLLYKLCLSGEGWPYIGSRSQIVGRA |
| | | WDNTLIDLEGKPAVSPPPVKNGGPINLSPLSKGQEDLINQAV |
| | | QKLSPKETTWIDIEGPAGDPVELAIYQPESGNYLHCYRAPHN |
| | | ESAFKDQSRYSHGLLLKDLKAARPGLISAIIKALPKGMVLTA |
| | | QGSDDIEQLILMHGRRDIKVVDVKLTSEHARVFEDPVWDRF |
| | | NPLCEKHTGLVIKKKKKGAPPSSTNPHCALMDCIMFDATVT |
| | | GYIRDVKPRQLIPIDLLFKDDLNLINL |
| 107 | Amino acid sequence of Z | MGLRYSKAVKDKYGDREIEGRATMTLNLPQGLYGRFNCKR |
| | protein in PARV | CWFATKGLIACSDHYLCLNCLTIMLSDGNFCEVCGKTLPKK |
| | | IVFEESPSAPPYDG |
| 108 | Amino acid sequence of L | MTEIISELKDLIRKWVPDEEHYIEQKSLTLSQVHTRAVVIEGL |
| | protein in PARV | KLLSLIVEVDSCLKHKCIPNRNKTVNMILKDHKLVGPTLPEC |
| | | TPDGYYLCGDVLILLEVFVRSNQSAFEKKYAADFEKLMSLA |
| | | KDLTSYGITLVPVIDGRSNYYVEAIPDWVIERLRWLLLKVM |
| | | DSLKDEGEDIEETEYSRLIHSLSTMENQNLGLESISQLKQTGL |
| | | TYKKKLQALFTKNIRPNMSLGECRLKLIEIFNEFRLRLESGT |
| | | VERAYTQTNQDFLLNKLKEHSLLKVSRVSKFDSKGDCHLCS |
| | | NHLIKVLGLLKRQTTDEKEAPRIGMIRREYGLILSTCNKIKG |
| | | QKILNTRRNTLLSLDVVMFNAFLSLLRTYGEIVFDLMVGGC |
| | | LQSVNDRLVSPSLIIDLYNKKCTRNPQWLSKVMLKLNLLPG |
| | | YIQEDFKVFVRPHLVELDLDLWSNYLELYSTTFERRLEIQYT |
| | | VSEEEVHEKTDPEVIEWLEMKESTFKQYLDSLSTLSLGLVNS |
| | | MKTSGTSRFHINQPNDYYGTVKCEECFFQSLHHAYGVSLLY |
| | | QKTGERNRCYSLCSNSGKVGHIVSFYCDPKRFFLPIMSQQVL |
| | | LSMTQEMLSWLDFIKGDDLNLISSMLRRLILSVLACPSKRVQ |
| | | LYLQGLRYFLMAYVNEIHHVQLLAKLEVEVKSRSEWATMT |
| | | LADDLVVALLNMSNQPNMSKTFKFLLNVSYLCHLITKETPD |
| | | RLTDQIKCFEKFMEPKIDFGSVIVNSSLNGNMTEEEESKILLD |
| | | IDRLLSKQLNTSDQISKPGVNPTVMSLCCSLFNLGELDVNGK |
| | | LKRDPQSPSFTSTALDMSSNKSVVVPKLDELGNPLSTYDYA |
| | | AVVSSVIVDLSEGFKNKLRYKLDPHTLKYKIYKRFLSLVSD |
| | | KTPKENKLEMSQDEFLDEITDEQLEMIEKIEMEVNECLSKAA |
| | | NVEPRIGTGPDDKNPLKSLWAKEILCVIESETSKHEVKDFDY |
| | | TLFHHETYKELVELVFNSNSRNQYFTDRILNPCPLEYLMKN |
| | | LCRKYYEEEDYFECFKYILVSTGFDNKVGRYDHKNMCRLG |
| | | FKQSATRIREDARISCRESNSESILKRLDKSFFTNSSLRNLCFY |
| | | SEESPTAFDSVSSDLGRLKFGLSYKEQVGGNRELYVGDLNT |
| | | KLMTRLIEDYFECLMEKMKYTCLNNEAEFERALLDMKSVV |
| | | RRSGFTVSMDHSKWGPHMSPVIFSQLFKALQFSLPDGSQID |
| | | KEPILNLLSWHIHKVVEVPFNVVHAYTKGYLKRLCGLMDN |
| | | RTSKTEDFMDKFFADEVIPSHISSVLDMGQGILHNVSDFYGL |
| | | ITEQFISYALQTCVGVLSMAFTSSDDEILLGVTNDLKNQDES |
| | | LDIDKSLEFLEFHNYLSATLNKFISPKTVAGTFACEFKSRFYI |
| | | WSQEVPLLTKFTAAALHNVKAKAPNQLCETIDTIQDQCVAN |
| | | GVSVEVVGAISKRTNNIIKYSGHPSNPFLCLNDMDVKDWVD |
| | | GSRGYRLQRSVENVYNDDEIPEYVRDMAARLFYLIRNGQV |
| | | QEEYLISSMQSDPDECFTLLAGILGVPEQNISRLLDIRWLNLR |
| | | AHGDLRMVLRTKLMGSNRVIQREEVPSLIKSVQSKLSKNFV |
| | | RGARKIITDAVNKSAFQSCIAAGFVGICKSMGSKCVRDGKG |
| | | GFMYIKDILSKIQYHKNCDVCKVSSGIYCKESLKAVSDFSRP |
| | | LFWDYFALVLTNACELGNWVFSKPKIPDVVYKLDNPNFFW |
| | | PVKPASHTELEDKIGMNHVLYSIKRNYPDIFEEHLAPYLTDL |
| | | NTLKLSWVQKVKFLDICVAIDMVSESLGIISHMIKRKREELY |
| | | IVKQNEQSMSHTRESQELAGGFRVTNEQICHNFLLQILFDSM |
| | | ITPVLLTSSQFKKYFWYGEVELLPNDCEHPLGQLTQFIMDCK |
| | | KLNLSRAMNLDDLDVGFVHSTIKLSDVFLNFSTFLTKVDWE |
| | | NRKDYNNLEELLKSTLESQLVLSIGLTFTHLRRSLKYKYERS |
| | | TVYTIIAKVILDIEQLTLNEDDQICLIVQEVECYVSQSGGDHI |
| | | SLDGAALIPLTPIISGTETLCLDEVAIRQDDMLKGVSKHLGN |
| | | VKLDFSSHIKELKNKFSYKIQGPQVGMNPLHIDKGIIMEGDK |
| | | VVSRLDVNVTAKSLFMALELLTDDELIRKFLRSLFYYLKSV |
| | | KKGTALISLLSSDLKDIAEVYFNHFKDILKEEADWVSFGSFQ |
| | | LVYSKSLDTIMIGDEKGEFRLKGVNCKRLIPVIPAVQEIE |
| 109 | Amino acid sequence of | MGQFITLMQSIPEALNMAFNVALVIVSLLCVTKGLINLWKC |
| | glycoprotein precursor | GIIQLLMFLALAGRSCDGEYKIDRRHVLSHVEFNLTRMFDN |
| | (GPC) protein of Pirital | LPQSCSINNTHHYYKGPENTTWGVELTLTNTSVMNRSDENV |
| | virus (PIRV) | TSIRSLGFGNITNCDKTGEAGHTLKWLLNELHFTVLHVTRHI |
| | | GALCRTTAGAGLLIQYNLTTSDKGGEVGRHLIASLAQIIGDN |
| | | KAAWVGKCYNNCTSSGKCSLTNCEGGTHYKFLVIQNTTWP |
| | | NHCSYSPMSTVRMIIQKTAYSSVSRKLLGFFTWDISDSSGQH |
| | | VPGGYCLEQWAIVWAGIKCFDNSVMAKCNKDHNEEFCDT |
| | | MRLFDFNQNAIKTLQLNVENSLNLMKKSINGLISDSLVIRNS |
| | | LKQLAKIPYCNYTKFWYVNDTITGKHSLPQCWLVSNGSYL |
| | | NETHFKNEWLWESQKLYNDMLLKEYEERQGNTPLALADL |
| | | CFWSLVFFTTTVFFQLIGIPTHRHLIGEGCPKPHRLTSNSLCS |
| | | CGFYKIPKKPFRWVRKGK |
| 110 | Amino acid sequence of | MASDNVASFRWTQALRRGLSNWTNPVKSDVITDTRALLAA |
| | nucleoprotein of PIRV | LDFDRVAQVQRLMRKDKRTDTDLTKLRDLNKEVDALMNM |
| | | RTTQKDNVLRVGGLSKDELMELASDLQKLKKKVLRVEGSG |
| | | QPGVYAGNLTTTQLEQRSKILRDMGFAQLRGNPSGVVKVW |
| | | DIKDSSLLINQFGSMPAVTMACMTEQGGESLNDVVQGLSAL |
| | | GLLYTVKYPNMSDLEKLADQYPCLGYITQEQSQINVSGYNL |
| | | SLSAAVKAGACMLDGGNMLETIQVKPTMFSSMIKAVLEVK |
| | | SKERMFVSEAPGQRNPYENLLYKLCLSGDGWPYIGSRSQVK |
| | | GRAWDNTTVDLTDTGSPNHPPVRNGGSPRLSQLSHAKEEQI |
| | | LEGLKRLDSKATTWIDIEGTPNDPVELAIFQPESGNYIHCYR |
| | | EPHDVKSFKDQSKYSHGMLLKDLTNTQPGLISFIIKNLPAGI |
| | | VLTAQGSDDIEKLLEMHARRDISIIDVRLTSEQARQFEDKVW |
| | | DKFGILCNKHKGIVLARKKKGSPPGSKNPHCALLDCIMFCST |
| | | IGGFVDDKKPTRLLPLDLLYREQASLIEL |
| 111 | Amino acid sequence of Z | MGLRYSKEVRERHGDKDLEGRVPMTLNLPQGLYGRFNCKS |
| | protein of PIRV | CWFANRGLIACSDHYLCLNCLTRLRSQSQFCGICGKPLPTKI |
| | | RFEESPSAPPYEP |
| 112 | Amino acid sequence of L | MEEHVNELHDLVRKWVSDDENFAEQKAIFLSQTKLRAITIE |
| | protein of PIRV | GLKLLSTIVEVDSCQKNSCIHNREKTLNSILRDNKIVCPTLPE |
| | | IVPDGYRLIGDVLILLEVFVRSNQESFEKKYEQDYTKLMQV |
| | | KKDLQSHGITLVPMIDGRSSYYVEFMPDWVVEKIRWHLIKL |
| | | MDLLKEDGESVEELEYERLVSSLSALENQSLGLESLLSIKER |
| | | GIEYIDRLTKIMYGNLNNNMSVDECKGEILRIYQNFRQLFDQ |
| | | GQFKPKYRKTDREFILKTLREHGLIKCAIMSEEDSCKNCMIH |
| | | MFKVLTIIKQSFVSNKNIESSFILKEYNQLLSVCNKVKSLKVL |
| | | NTRRGTLMVLDLIMLNKLLSLIKIYGIKAALTILRMQCIPAV |
| | | NDRLLSIDFLISIYERKMIKSPKWLEKVHGKLKRVVQDCMF |
| | | KALEDYLVEIDFDTWFSIKDELLMTQQFKPSICYRSSKGCVC |
| | | NAETLKNLSMMTEEDFLSYLKILSSLSLSLVNSMKTSSAPKS |
| | | KINQANDFYGIVHCEEVYFQGFGDNNACTLLYQKTGEKSRC |
| | | YSVAFSDNEQQIDYGSKISFYADPKRFFLPIMSQDVLNRMCN |
| | | EMLSWLDFLSDDNIKVVADLLRKLILCVLCTPSKRVQVYLQ |
| | | GFRYLIMAYVNEIHCNDLFAKLEVDALTASERQVMIWMDD |
| | | LTRIVLEMSKEADMAKSFKFILNLSYLCHLITKETPDRLTDQI |
| | | KCFEKFLEPKLKFGSLMVNPDSTPELTSEQEDQVCEGLHRLL |
| | | NKKIFSKCENIPGVSKELVSLCSSLFNSSNLEVKPLLNHDPLT |
| | | PSFTSTALDLSSNKSVVVPKLNEIGETLTEYDFGKIVSSVVV |
| | | DLTEHFKTKGKYKLDPRDLRFRIFKKLSSLVEVNPTKKSNR |
| | | KSESGEVVAPDESFMDELTEEQQLMLSEIEVKVSKTFEGMS |
| | | KDELNRKQSKEKGAEAHLKRLWSKEVRDKISSETSLHEVK |
| | | DFDVQLFPFDTYEELVTIVFNDKSAHDFYFLEKYLNPCPLD |
| | | MLMKNLTLKAFNEGDFFECFKYILIASEFDNKIGRYDHKIRT |
| | | RLGLKDPALKIREEARISTRESNSESIAKRLDKSFFTNSSLRN |
| | | LCFYSDESPTTRTGVATDVGKLKFGLSYKEQVGGNRELYV |
| | | GDLNTKLITRLVEDYAESICSNMKYTCLNSESEFERALLDM |
| | | KSVVRQGGFAVSMDHSKWGPHMSPAIFAQLLRCLKFRLKD |
| | | GSEIDKKAVLNILYWHLHKIVEVPFNVVQAFMSGFVKRGLG |
| | | LMDRGGATLSEEFMFGFFEKGVVPSHLSSVVDMGQGILHN |
| | | MSDLYGLITEQFINYVLDFCYNVSMTSYTSSDDEIMLSTSSA |
| | | LNHEDGSLNVDVALEILEFHNFLSDKLNKFVSPKTVAGTFA |
| | | SEFKSRFFIWSQEVPLLTKFVAAALHNIKAKAPNQLAETVDT |
| | | ILDQCVANGVSIEIVGAISKRTNSLVCYSGHPLNPFLCLEESD |
| | | VRDWVDGSRGYRLQRSIENIFPDDLCPNLIRDACRKVFHRIQ |
| | | SGKIEEEFLVASIQGSPDECLNSMLTIADVDEDIKKDLAGYR |
| | | WLNLRAYGDLRLVLRTKLMSSTRTLQREEIPSLVRSVQSKL |
| | | SKNFVRGAKRILTDAINKSAFQSCISSGFIGVCKSMGSKCVR |
| | | DNTGGFVYIKEITKHVMPHTTSYCPYCKPSKNIYCEDALRSV |
| | | SEYSRPIFWDYFSLVLSNACELGNWVFGAPILPKTVFHLDNP |
| | | NHFWPIKPSSQTELEDKVGMNHVLYSIRRNYPSIFDEHISPY |
| | | MSDLNMLRLSWVQKIKFLDLCVALDMSSECLGIISHIMRRK |
| | | REELYIVKQQELSMSHTRESTNLESGLSLEPQEVCKNFLLQV |
| | | LFDSMVNPVLLTTSQFRKYFWYGEVLQLPNDASHHLAQFT |
| | | QFILDCKQLNSSRAMTLDDLDVGYVTSRVKRTTTFVALSTFI |
| | | TSLDWENRHEYKSFQELILSSPCDVFKFEFSMTFSHIRSSHKF |
| | | RYERCTSYILKVHVVFDKRVLNSNMLEDQSLLITPHSVEYF |
| | | VSQSGGNHISLDGVGLLPLDPLISGKEVLNIDDVLRHEDVNF |
| | | SAESPLFSKMRFDFKPFLKELKNKFSYKLIGPDIIMEPLVLDK |
| | | GQIKEGSRIVSQLKLRLDFKAVFVALGCLEEESRSTFISNLFM |
| | | YIGSLRGEEHRISMTESNLVQLIDNYPQVFDSMLDATNDWL |
| | | NCGSFSLCKSKSLGCVMIADERGPFKLKGVNCRRLLPDSQA |
| | | VEID |
| 113 | Amino acid sequence of | MGQLFSFFEEVPNIIHEAINIALIAVSLIAALKGMINLWKSGL |
| | glycoprotein precursor | FQLIFFLTLAGRSCSFRIGRSTELQNITFDMLKVFEDHPTSCM |
| | (GPC) protein of Sabia | VNHSTYYVHENKNATWCLEVSVTDVTLLMAEHDRQVLNN |
| | virus (SABV) | LSNCVHPAVEHRSRMVGLLEWIFRALKYDFNHDPTPLCQK |
| | | QTSTVNETRVQINITEGFGSHGFEDTILQRLGVLFGSRIAFSNI |
| | | QDLGKKRFLLIRNSTWKNQCEMNHVNSMHLMLANAGRSS |
| | | GSRRPLGIFSWTITDAVGNDMPGGYCLERWMLVTSDLKCF |
| | | GNTALAKCNLDHDSEFCDMLKLFEFNKKAIETLNDNTKNK |
| | | VNLLTHSINALISDNLLMKNRLKELLNTPYCNYTKFWYVNH |
| | | TASGEHSLPRCWLVRNNSYLNESEFRNDWIIESDHLLSEML |
| | | NKEYIDRQGKTPLTLVDICFWSTLFFTTTLFLHLVGFPTHRHI |
| | | RGEPCPLPHRLNSRGGCRCGKYPELKKPITWHKNH |
| 114 | Amino acid sequence of | MGQLFSFFEEVPNIIHEAINIALIAVSLIAALKGMINLWKSGL |
| | GP signal peptide of | FQLIFFLTLAGRSCS |
| | SABV | |
| 115 | Amino acid sequence of | FRIGRSTELQNITFDMLKVFEDHPTSCMVNHSTYYVHENKN |
| | GP1 of SABV | ATWCLEVSVTDVTLLMAEHDRQVLNNLSNCVHPAVEHRSR |
| | | MVGLLEWIFRALKYDFNHDPTPLCQKQTSTVNETRVQINIT |
| | | EGFGSHGFEDTILQRLGVLFGSRIAFSNIQDLGKKRFLLIRNS |
| | | TWKNQCEMNHVNSMHLMLANAGRSSGSRRPL |
| 116 | Amino acid sequence of | GIFSWTITDAVGNDMPGGYCLERWMLVTSDLKCFGNTALA |
| | GP2 of SABV | KCNLDHDSEFCDMLKLFEFNKKAIETLNDNTKNKVNLLTHS |
| | | INALISDNLLMKNRLKELLNTPYCNYTKFWYVNHTASGEHS |
| | | LPRCWLVRNNSYLNESEFRNDWIIESDHLLSEMLNKEYIDR |
| | | QGKTPLTLVDICFWSTLFFTTTLFLHLVGFPTHRHIRGEPCPL |
| | | PHRLNSRGGCRCGKYPELKKPITWHKNH |
| 117 | Amino acid sequence of | MSNSKEIPSFRWTQSLRRGLSEFTTPVKTDVLRDAKMILDGL |
| | nucleoprotein of SABV | DFNQVSLVQRILRKSKRNDGDLDKLRDLNKEVDNLMSMKS |
| | | SQRDTILKLGDLNKSELMDLASDLEKLKRKVGQTERSASGG |
| | | VYLGNLSQSQLTKRSDLLRKLGFQQQQVRSPGVVRIWDVA |
| | | DPNRLNNQFGSVPALTIACMTKQSDNTMGDVVQALTSLGL |
| | | LYTVKFPNLIDLEKLTAEHDCLQIVTKDESGLNISGYNYSLS |
| | | AAVKAGATLLDGGNMLETIRITPDNFSQIIKTTLSIKKKEGM |
| | | FVDEKPGNRNPYENLLYKICLSGEGWPYIGSRSQIKGRSWE |
| | | NTTVDLSTKPQQGPRTPEKAGQNIRLSHLTELQESVVREAM |
| | | GKIDPTLTTWIDIEGTSNDPVELALYQPDTGNYILCYRKPHD |
| | | EKGFKNGSRHSHGMLLKDLESAQPGLLSYVIGLLPQNMVLT |
| | | TQGSDDIRRLVDTHGRKDLKIVDIKLASEQARKFEEPIWSDF |
| | | GHLCKKHNGVIVPKKKKDKDIPQSSEPHCALLDCLMFQSAI |
| | | AGQPPQTKLEGLLPDALLFTLEAAFTI |
| 118 | Amino acid sequence of Z | MGNSKSKSKLSANQYEQQTVNSTKQVAILKRQAEPSLYGR |
| | protein of SABV | HNCRCCWFANTNLIKCSDHYICLKCLNIMLGKSSFCDICGEE |
| | | LPTSIVVPIEPSAPPPED |
| 119 | Amino acid sequence of L | MQDPLLGTLSELKDLVRKTIPDVIELAYQKDALLSQVHPRS |
| | protein of SABV | VLIEGFKLLSLLVELESCKVNACHHNYEQKFIDVILSDGGILC |
| | | PTLPKVVPDGYNLMGKTLILLETFVRVNPDDFEKKWKADM |
| | | SKLISLKTDLGKIGVTLVPVVDGRSNYNTSFVSDWTTERLR |
| | | WLLIEVLKGMKTTSELEIEEQEYHRLIHSLAKTNNQSLGFEN |
| | | LECLKRNMLSYDQLLDSSLLVGVKNDVKESKVMEELIRLKI |
| | | WYKSEVYEKGLGKFVKTDKKVLLSQLITLGSHEENDSLDC |
| | | AFCSSRILELCFKLSVKMHEDVLTRGLNLDGTKTLHSSVQS |
| | | YLNVLSMCNKIKGSKIFNTRRNTLLFLDLIMLNFVVDEMVK |
| | | DSTVIRNLKNAGLIVGQMILLVNDRVLDILTANKLIRQKLTT |
| | | NEKWLSICSSVLKRYDLELWEKLCYLIRVPDFNELFQLAKE |
| | | LVSDRPMMRYSVHKAEERQCCHKAMENFTDDDFKIMLKA |
| | | LSHLSLGLINSMKTSFSSRLLINERDYSRYFGNVRLRECYIQR |
| | | FPITNNIIGLLFYQKTGERSRCYSLYIAENGELTEIGSFYCDPK |
| | | RYFVPIFSEAVITSMCEEMINWLNFDSELVRIVSTQLKTLML |
| | | LLLCSPSKRNQTFLQGLRYFIMAYVNQAHHIDLMSKLAVEC |
| | | KSSSEIQLQRLCVRLFVSILSGDNEIEYGFTRRFKFLLNISYLC |
| | | HFITKETPDRLTDQIKCFEKFLEPKLKFNSVIVNPSLNGTLTE |
| | | SQEHQMISSIDRFFSKELLDQSDVKEPGVSRELLGYCVSLFN |
| | | RGKLRVSGDLKVDPFRPTFTSTALDISSNKSVVVPKLDELGN |
| | | IVDKYNKQLMVSSCVTSLVEMFKTKGRYNLDPDSIDFLVLK |
| | | NLTNLVSANVPQEKSQEELSTLYEALTEDQISAFEQVRDEV |
| | | QLALHKMKSSDAREERLQDPKRNEKNASKGKILESLWSPH |
| | | QVNRAIKNETSIHEIKDFDPDILDSHLVEKLCHEVYNSSQKS |
| | | LFFLDEPLKSVPLEMLLINLTTIAYEEEEFFECFKYLLIQGDF |
| | | DQKLGTYEHKSRSRLGLSSEALKVQENARVSTRESNAEAIA |
| | | KKLDRTFFTSAALRNLCFYSEDSPTEFTSVSTNTGNLKFGLS |
| | | YKEQVGSNRELYVGDLNTKLMTRLVEDFSEVVTGSMRFSC |
| | | LNSEKEFERAICDMKMAVNNGDFSLSMDHSKWGPHMSPAL |
| | | FFTFLANLNLTEPKSRTRLNLDPLLNILKWHLHKTVEVPFNV |
| | | AQAYCIGKLKRSLGLMECQCSSLTEEFYHSYLQIQDEIPSHI |
| | | MSVLDMGQGILHNLSDLYALITEQFLNYVIHKLFDIDVTSYT |
| | | SSDDQISIMKLPLSTKENDEDFDWLEIICFHEYLSSKLNKFVS |
| | | PKSVVGNFVAEFKSRFFVMGEETPLLTKFVAAALHNVKCKT |
| | | PTQLAETIDTICDQCVANGVGVDIVSRISERVNRLISYSGYKE |
| | | TPFLTIVNQDVKDWTDGSRGYRLQRNIENSFGNQELLRLIRR |
| | | GARKVFLEIKKGHVFEENLIGLIGRGGDEALRGFLLYAGFAE |
| | | NDIVEALRHKWLNPSTFGDLRLVLRTKIMSSKRILERESVPS |
| | | LIKTLQSRMSKNFIKGAKKILAESINKSAFQSSVASGFIGFCK |
| | | SMGSKCVRDGKGGFMYLKELYNNVNKCGCCICLEWPGVV |
| | | YCQDSLAKISQFARSILWDYFTLVLTNACEIGEWVFSDVKSP |
| | | SAPPILSNPNLFWAVKPKIQKHIEDRLSLNHILHSIKRNYPYL |
| | | FEEHLAPFMSDLQFNQMMNPSHVKFLDVCIALDMMNENLG |
| | | IIGHLLRGRNHFIYIVKQSECASAHIRQSDYVDHELGLSPQQ |
| | | VCYNFKVQFLFSSMIDPLIVSTSTLKTFFWFNEVLSIEEEDQI |
| | | DLGELTDFTLFIKTGHLNRAMTADDITMGYVCSNLAEEIITL |
| | | NSYGSFQEFRSNHPSKNDLSDILKTLTSESIKLTLDIQIVHMR |
| | | NSTKYNISRKIVYTLKALCALPLEDCFTKDPVALVESLELFA |
| | | SGVNGGHLQLDGVTMVSVLPLLRGKKAVNLAQILMDNDL |
| | | AATNDHNVMESVTLDFTKFHDELGDKFCYSLVGPEDQGNPI |
| | | VLHNGMFMIDNQKLSYLKVEIFGDTIIKALGALDSPREIGSL |
| | | LHGLWPYLKATKQIINFDQTDFEMIYDLHRVVLLESIAQFGD |
| | | WVEFASFKVAFSKHYKDIVVADNLGNLRLKGVTCRLFRQQ |
| | | QSVEDIE |
| 120 | Amino acid sequence of | MGQFISFMQEIPIFLQEALNIALVAVSLICIVKGLVNLYRCGL |
| | glycoprotein precursor | FQLMVFLVLAGRSCSEETFKIGMHTKFQEVSLSLSALLTNQS |
| | (GPC) protein of Tacaribe | HELPMLCLANKTHLYLKSGRSSFKINIDSVTVLTRSEVNLTSI |
| | virus (TCRV) | NLTRSIDVFVHSPKLGSCFESDEEWVVAWWIEAIGHRWDQ |
| | | DPGLLCRNKTKTEGKLIQINISRADGNVHYGWRLKNGLDHI |
| | | YRGREEPCFEGEQCLIKIQPEDWPTDCKADHTNTFRFLSRSQ |
| | | KSIAVGRTLKAFFSWSLTDPLGNEAPGGYCLEKWMLVASEL |
| | | KCFGNTAIAKCNQNHDSEFCDMLRLFDYNKNAIKTLNEETK |
| | | TRVNVLSHTINALISDNLLMKNKIRELMSVPYCNYTRFWYV |
| | | NHTLSGQHSLPRCWMIRNNSYLNSSEFRNEWILESDFLISEM |
| | | LGKEYSERQGRTPITLVDICFWSTVFFTSTLFLHLIGFPTHEHI |
| | | RGEGCPLPHRLNSMGGCRCGKYLPLKKPTIWHRRH |
| 121 | Amino acid sequence of | MGQFISFMQEIPIFLQEALNIALVAVSLICIVKGLVNLYRCGL |
| | GP signal peptide of | FQLMVFLVLAGRSCS |
| | TCRV | |
| 122 | Amino acid sequence of | EETFKIGMHTKFQEVSLSLSALLTNQSHELPMLCLANKTHL |
| | GP1 of TCRV | YLKSGRSSFKINIDSVTVLTRSEVNLTSINLTRSIDVFVHSPKL |
| | | GSCFESDEEWVVAWWIEAIGHRWDQDPGLLCRNKTKTEGK |
| | | LIQINISRADGNVHYGWRLKNGLDHIYRGREEPCFEGEQCLI |
| | | KIQPEDWPTDCKADHTNTFRFLSRSQKSIAVGRTLK |
| 123 | Amino acid sequence of | AFFSWSLTDPLGNEAPGGYCLEKWMLVASELKCFGNTAIA |
| | GP2 of TCRV | KCNQNHDSEFCDMLRLFDYNKNAIKTLNEETKTRVNVLSH |
| | | TINALISDNLLMKNKIRELMSVPYCNYTRFWYVNHTLSGQH |
| | | SLPRCWMIRNNSYLNSSEFRNEWILESDFLISEMLGKEYSER |
| | | QGRTPITLVDICFWSTVFFTSTLFLHLIGFPTHEHIRGEGCPLP |
| | | HRLNSMGGCRCGKYLPLKKPTIWHRRH |
| 124 | Amino acid sequence of | MAQSKEVPSFRWTQSLRKGLSQFTQTVKSDILKDAKLIADSI |
| | nucleoprotein of TCRV | DFNQVAQVQRVLRKTKRTDDDLNKLRDLNIEVDRLMSMKS |
| | | VQKNTIFKVGDLARDELMELASDLEKLKDKIKRTESNGTNA |
| | | YMGNLPQSQLNRRSEILRTLGFAQQGGRPNGIVRVWDVKD |
| | | SSKLNNQFGSMPALTIACMTVQGGETMNNVVQALTSLGLL |
| | | YTVKYPNLSDLDKLIPNHECLQIITKEESSINISGYNLSLLAA |
| | | VKAGASILDGGNMLETIRVSPDNFSSLIKNTLQVKRREGMFI |
| | | DDRPGSRNPYENLLYKLCLSGDGWPYIGSRSQIMGRSWDNT |
| | | SVDLTKKPDAVPEPGAAPRPAERKGQNLRLASLTEGQELIV |
| | | RAAISELDPSNTIWLDIEDLQLDPVELALYQPAKKQYIHCFR |
| | | KPHDEKGFKNGSRHSHGILMKDIEDAVPGVLSYVIGLLPPN |
| | | MVITTQGSDDIRKLLDIHGRKDLKLIDVKFTSDQARLFEHQV |
| | | WDKFGHLCKQHNGVIISKKNKSKDSPPSPSPDEPHCALLDCI |
| | | MFHSAVSGELPKEEPIPLLPKEFLFFPKTAFAL |
| 125 | Amino acid sequence of Z | MGNCNRTQKPSSSSNNLEKPPQAAEFRRTAEPSLYGRYNCK |
| | protein of TCRV | CCWFADKNLITCSDHYLCLRCHQIMLRNSELCNICWKPLPT |
| | | SIRVPLEASAPDL |
| 126 | Amino acid sequence of L | MDETVSELKDLVRKHIPNRHEFAHQKDAFLSHCHSGSLLQE |
| | protein of TCRV | GFKLLSNLVELESCESHACHLNTCQKYVDVILSDHGIPCPTL |
| | | PKVIPDGFKLTGKTLILLETFVRVNPEEFERKWKSDMTKLLN |
| | | LKQDLLRSGITLVPVVDGRTNYSNRFTPEWVVERIRWLLIEI |
| | | LRKSRSSAEIDIEDQEYQRLIHSLSNVRNQSLGFENIECLKRN |
| | | LLEYDDRLAKSLFVGVKGDVRESVIREELMKLRLWYKKEV |
| | | FDKNLGKFRITNRSELLNNLIRLGKHEDNTTSDCPFCVNKFM |
| | | DIIYSLTFTALKRQDREKSNSELDQYVVCPHEKAYLGVLSIC |
| | | NKIKGLKVFNTRRNTLLFLDLIMVNFLDDLFTAKPEALDSLR |
| | | RSGLILGQMVTLVNDRALDFLEAVKLIKKKIETNVKWVENC |
| | | SKILRRSQQDIWSQISVWARYPDLSKLISIAQTISSDRPIMRYS |
| | | AGGNFNTECKHKTFHMMSDAEQVEAFKILSSVSLSLINSMK |
| | | TSFSSRLLINEKEYSRYFGNVRLRECYQQRFFLTDGLIVILFY |
| | | QKTGERSGCYSIYTCEDGVLVEKGSFYCDPKRFFLPIFSQEV |
| | | LVEMCDEMTTWLDFNSDLMVISKEKLRLLLLSILCAPSKRN |
| | | QVFLQGLRYFLMAYSNQFHHVDLLSKLKVECMSGSEVIVQ |
| | | RLAVDLFQCLLGEGVDSDPYFARRFKYLLNVSYLCHLITKE |
| | | TPDRLTDQIKCFEKFIEPKIDFNCVIVNPSLNGQLTEAQEGM |
| | | MLDGLDKFYSKTLKDCSDTKLPGVSNELLSYCISLFNKGKL |
| | | KVTGELKNDPFKPNITSTALDLSSNKSVVVPKLDELGNVLS |
| | | VYDREKMISSCVSSMAERFKTKGRYNIDPSTLDYLILKNLTG |
| | | LVSIGSKTQRDCEELSMMFEGLTEEQAEAFNDIKNSVQLAM |
| | | VKMKDSKSGDVNLSPNQKEGRVKSSTGTLEELWGPFGIMR |
| | | EIRTEVSLHEVKDFDPDVLASDLYKELCDVVYYSSSKPEYFL |
| | | ERPLEVCPLGLLLKNLTTSAYFDEEYFECFKYLLIQGHYDQK |
| | | LGSYEHRSRSRLGFTNEALRVKDEVRLSMRESNSEAIADKL |
| | | DRSYFTNAALRNLCFYSDDSPTEFTSISSNNGNLKFGLSYKE |
| | | QVGSNRELYVGDLNTKLITRLVEDFAEAVGSSMRYTCLSSE |
| | | KEFDRAICDMKLAVNNGDLSCSLDHSKWGPTMSPALFLTFL |
| | | QFLELRTPKERNIINLEPVLNVLRWHLHKVIEVPVNVAEAYC |
| | | TGNLKRSLGLMGCGSSSVGEEFFHQFMPVQGEIPSHIMSVL |
| | | DMGQGILHNMSDLYGLITEQFLNYVLDLLYDVIPTSYTSSD |
| | | DQVTLIKLPCASDDNQVNDEWLEMLCFHEYLSSKLNKFVSP |
| | | KSVAGTFVAEFKSRFFVMGEETPLLTQFVAAALHNVKCKTP |
| | | TQLSETIDTICDQCVANGVSVQIVSKISQRVNQLIKYSGFKET |
| | | PFGAVEKQDVKDWVDGTRGYRLQRKIESIFSDDEMTGFIRS |
| | | CAKRVFNDIKRGKVFEENLISLIGRDGDDALVGFLRYSSCSE |
| | | QDIMRALGFRWVNLSSFGDLRLVLRTKLMTSRRVLEREEVP |
| | | TLIKTLQSRLSRNFTKGVKKILAESINKSAFQSSVASGFIGFC |
| | | KSIGSKCVRDGEGGFLYIKDIYTKVKPCLCEVCNMKRGVIY |
| | | CRPSLEKIEKFSKPILWDYFSLVLTNACEIGEWVFSSVKEPQI |
| | | PVVLSNRNLFWAVKPRIVRQLEDQLGMNHVLYSIRKNYPK |
| | | LFDEHLSPFMSDLQVNRTLDGRKLKFLDVCIALDLMNENLG |
| | | IVSHLLKARDNSVYIVKQSDCAMAHVRQSDYVDKEVGLSP |
| | | QQVCYNFMVQIILSSMVNPLVMSTSCLKSFFWFNEVLELED |
| | | DGQIELGELTDFTFLVRDQKISRAMFIEDIAMGYVISNLEDV |
| | | RLYIDKITIGEQPLAPGRHINDLLDLLGNFDDHEDCDLRFLIQ |
| | | VEHSRTSTKYRFKRKMTYSFSVTCVSKVIDLKEASVELQVV |
| | | DVTQSVSGSGGSHLLLDGVSMIAGLPIFTGQGTFNMASLMM |
| | | DADLVETNDNLILTDVRFSFGGFLSELSDKYAYTLNGPVDQ |
| | | GEPLVLRDGHFFMGTEKVSTYRVELTGDIIVKAIGALDDPED |
| | | VNALLNQLWPYLKSTAQVMLFQQEDFVLVYDLHRSGLIRS |
| | | LELIGDWVEFVNFKVAYSKSLKDLVVSDNQGSLRLRGIMCR |
| | | PLARRNTVEDIE |
| 127 | Amino acid sequence of | MGQLVSFIGEIPAIVHEALNVALIAVSIIAIMKGLINIWKSGLF |
| | glycoprotein precursor | QLIMFLILAGRSCSISIGHHLELQHFIINSTSLLPSMPTLCRINA |
| | (GPC) protein in Bear | TNSLIRGPFSAQWGLDIFIGDLTILVNPEPGSKTKRMTATNIT |
| | Canyon virus (BCNV) | GCFPNNEDPDSVAQVLSWFFRGVHHDFHLDPTILCDESVTV |
| | | FRIQMNLTERMYCDRIVSKLARLFGSFGDYCSKVGKKLVIIR |
| | | NVTWSNQCHEDHVGSMQLILQNAHNQVMRFRKLQNFFSW |
| | | SLVDSAGNSMPGGYCLEKWMLVASELKCFGNTAVAKCNIN |
| | | HDSEFCDMLRLFDYNKKAIVNLQDKTKAQLDSLIDAVNSLI |
| | | SDNLITKNKIRELMNIPYCNYTKFWYVNHTGLNVHSLPKCW |
| | | HVRNGSYLNESDFRNEWIIESDHLVSEILAKEYEERQKRTPL |
| | | SLVDLCFWSTLFYTASIFLHLLHIPTHRHIIGEGCPKPHRLTS |
| | | DSLCACGFFQLKGRPTRWARIP |
| 128 | Amino acid sequence of | MGQLVSFIGEIPAIVHEALNVALIAVSIIAIMKGLINIWKSGLF |
| | GP signal peptide in | QLIMFLILAGRSCS |
| | BCNV | |
| 129 | Amino acid sequence of | ISIGHHLELQHFIINSTSLLPSMPTLCRINATNSLIRGPFSAQW |
| | GP1 protein in BCNV | GLDIFIGDLTILVNPEPGSKTKRMTATNITGCFPNNEDPDSVA |
| | | QVLSWFFRGVHHDFHLDPTILCDESVTVFRIQMNLTERMYC |
| | | DRIVSKLARLFGSFGDYCSKVGKKLVIIRNVTWSNQCHEDH |
| | | VGSMQLILQNAHNQVMRFRKLQ |
| 130 | Amino acid sequence of | NFFSWSLVDSAGNSMPGGYCLEKWMLVASELKCFGNTAV |
| | GP2 protein in BCNV | AKCNINHDSEFCDMLRLFDYNKKAIVNLQDKTKAQLDSLID |
| | | AVNSLISDNLITKNKIRELMNIPYCNYTKFWYVNHTGLNVH |
| | | SLPKCWHVRNGSYLNESDFRNEWIIESDHLVSEILAKEYEER |
| | | QKRTPLSLVDLCFWSTLFYTASIFLHLLHIPTHRHIIGEGCPK |
| | | PHRLTSDSLCACGFFQLKGRPTRWARIP |
| 131 | Amino acid sequence of | MSDQVVHSFRWTQSLRRGLSNWTCPVKADVLNDTRALLSG |
| | NP protein in BCNV | LDFAKVASVQRMMRRDKRDESDLTSLRDLNKEVDSLMTM |
| | | KSTQKNMFLKVGSLSKGELMELSGDLNKLKDKVQRTERPP |
| | | GSGGQYQGNLTTTQLTRRGELLQFIGIQKAGRVGMNGVVK |
| | | VWDVKDSSLMINQFGSMPALTISCMAEQGGETLNDVVQGL |
| | | TDLGLLYTAKYPNLNDLEALSEKHPCLKVITQEESQINISGY |
| | | NLSLSAAVKAGACLIDGGNMLETIKIDTSTFTTVIKTLLEVK |
| | | ARERMFVSSVPGQRNPYENILYKLCLSGEGWPYIASRSQIKG |
| | | RAWDNTVVEFDSAPPRAPVPVRNGGAPLLGPLRPELEDQVR |
| | | KGVEGLSPNLTTWIDIEGPPNDPVELAIYQPETQKYLHCYRR |
| | | PNDIKSFKDQSKYCHGILLKDVENARPGLISTIIRYLPKSMVF |
| | | TAQGEDDIKRLFDMHGRQDLKIVDVKLSAEQSRVFEELVW |
| | | KKFEHLCDRHKGIVIKSKKKGSKPASTNAHCALMDCIMFNA |
| | | VLVGFVADEKPKRLLPIDILFREPDTTVVL |
| 132 | Amino acid sequence of Z | MGLRYSREVKQRYGEKELEGRIPITLDMPQTLYGRYNCKSC |
| | protein in BCNV | WFANKGLIKCSNHYLCLKCLTAMLSRSDYCGICGGILPKKL |
| | | VFETTPSAPPYTP |
| 133 | Amino acid sequence of L | MSEYLDELKELIRKWIPDEEMYIEQKTSFLSQVNLRSVVIEG |
| | protein in BCNV | LKLLSIIIEIDSCKKHGCVHNKNKTVNQILRDHRIVGPTLPDV |
| | | VPDGYRVIGSTIILLEAFVRVSHESFEIKYKSDFEKLMQLSKD |
| | | LSRCGLTLIPVVDGRSNYYTEHFPDWTIERMRWLILKITNFL |
| | | RDNGEEIEELEYSRLVYSLSNMENKNLGLESLKILKEEGLDY |
| | | KAKLMSVMRDGVNSNMSASECRVEMAKIYDQFSFLRKNG |
| | | LYKDVYCKTSRTEIINWLKDHKLILLSGETRTAMLDERQCG |
| | | YCRNHMFRILASLIKNKRHYQSLTNPKKCGSIQSHKKLLSDC |
| | | NKIKGLKVLNTRRFTLLCLDVIILNSLLELIDAGEIDNEFLVN |
| | | NHFKSVNDRLVSIDLIIDRLNKKLMSKPNWIGSVKYKMKRT |
| | | LEIHGLYYVSKWLKQVDIDSWYEFKMMREHSDKCVKPTLK |
| | | YKKDAARKCGQPEFGSSTILDDEVFLEYLEALSTLSLGLVNS |
| | | MKTSSAAKFLINDKSNYFGTVQCNECYFQDLDKSYNSLLIY |
| | | QKTGERSRCYGLMFKSEQFENVYEVGESFYADPKRFFLPIM |
| | | SSEVILKMCVEMLSWLDWLSEQELKAFKSKLYTLIINILTVP |
| | | SKRVQVYLQGFRYLIMAFVNELHFKELQNKLKVQPLTISEC |
| | | YVFTLMDDLVHLLLTEAQEENMSKVFRFVLNLSYLCHLVT |
| | | KETPDRLTDQIKCFEKFLEPKVDFNSVFVNLDSSPHLSGEVE |
| | | EKFIKDLNRLFSKDLGVEDLKDPGISKELISLCASCFNCGLLP |
| | | MSKVLKHDPQSPSFTSTALDISSNKSVVVPKLDEVGETVTQ |
| | | YDYQSLLSSTVVDMAQSFKDKLKYKLDRKSIQFAIFKRLTN |
| | | MVLKRKTDHDVKDDLDDELSEIVDDDTLRVINDVEANVSE |
| | | CLSKMGKISRAATVGGQNNLGRFEKIDTLKRLWDRESMNFI |
| | | LMETSLHEVKDFDPSIFPIEKYKSMCELVYDSKMKSEFFTDE |
| | | VLKFCPLDLLVKNLATKCYLEEDFFECFKYILISAGFDNRVG |
| | | RYDHRSRSRLGFKDEAILIKENSRISSRESNSEAISRRLDKSFF |
| | | TNSSLRNLCFYSEESPTYRSTVSSSVGKLKFGLSYKEQVGSN |
| | | RELYVGDLNTKLTSRLIEDYFESLTSECKFSCLNNDAEFERA |
| | | LLDMKCVVRLSGLAVSMDHSKWGPYMSPAIFNILFSNLNLE |
| | | LNDGVFIDKAPIENLLNWHLHKIVEVPYNVIDAYLKGYTKR |
| | | RLGLMDRSSTSITEDFIFNWFAKGVVPSHISSVLDMGQGILH |
| | | NTSDYYGLLTEQFILQCLDFIFDIKSTAYTSSDDEILLSNSPSL |
| | | KKVDEDSLDINKCQEVLEFHNYLSSKFNKFVSPKTVAGSFA |
| | | SEFKSRFFIWSQEVPLLTKFVAAALHNVKAKSPHQLAETVD |
| | | TILDQCIANGVSIEVVKAISRRTNKLITYSGHPKNPFLCVENT |
| | | DLKDWVDGSRGYRLQRSVESLFNDDDLPLTIRNSCRSLFHRI |
| | | RSGDIQEEFLINALQTSPDECLAKMLRLSDVDESTIDKVLEF |
| | | RWLNLRAHGDLRLVLRTKVMSGTRILDREEVPSLVKSVQS |
| | | KLSKNFVRGAKKIITDAINKSAFQSSICSGFIGFCKSMGSKCV |
| | | RDGNGSFQYIKHFLKSIILHSHCEVCKPEMSVFCRAALEELK |
| | | PFSRPIFWDYFSLTFSNACELGNWVFSNVTIPKRTPTTVNPNF |
| | | FWPVKPGSHTELEDKVNMNHVLYSIKRNFPDLFDEHIAPFLS |
| | | DLNSLKISWIQRIKFLDLCVAMDMSSECLGIISHIMRRKREEL |
| | | YIVKQNELSVAHMRDSSPMEAGYQLNSSEICHNFLCQLVFE |
| | | SMLHPVLLTTGQFKKYFWFGEVELLPNEADHDLGQLTQFV |
| | | MDCKTLNISRCMSLDDLDVGYVHSSILMGDIYVNFSSFLHL |
| | | LDWENRRNYKTFDEIILCSREDTIPMEIDFTISHSRKSFKFKY |
| | | ERKTNYHIKSKVLVQKVDIEEAQNQGFDILELEVHEIECFVS |
| | | GSQGNHISLDGVGLIPLHPLFSGKEFLDVNKLLIKQDENFEST |
| | | HSVFSKVKLNFSNHTKDLKNKYSYKLQGPEYNMNPLHLYR |
| | | GQIMENNFVISRLDVQITSRSVFLALEALESEDRIPFLISLHIY |
| | | TRSNNKKENSCFIRMTQSDLCLLIDSYEKEFTEVLKSLSDW |
| | | MDFGDFALCFSNNLNCIMIADPDGQFKLKGRQCRKVSSASA |
| | | PLEID |
| 134 | Amino acid sequence of | MGQLISFFGEIPSIIHEALNIALIAVSIISILKGVINIWGSGLLQF |
| | the glycoprotein precursor | IVFLLLAGRSCSYKIGHHVELQHIILNASYITPYVPMPCMIND |
| | (GPC) protein of | THFLLRGPFEASWAIKLEITDVTTLVVDTDNVANPTNISKCF |
| | Whitewater Arroyo virus | ANNQDERLLGFTMEWFLSGLEHDHHFTPQIICGNVSKGEVN |
| | (WWAV) | AQVNITMEDHCSQVFLKMRRIFGVFKNPCTSHGKQNVLISV |
| | | SNWTNQCSGNHLSSMHLIVQNAYKQMIKSRTLKSFFAWSLS |
| | | DATGTDMPGGYCLEKWMLISSELKCFGNTAIAKCNLDHSSE |
| | | FCDMLKLFEFNRNAIKTLQNDSKHQLDMIITAVNSLISDNTL |
| | | MKNRLKELINIPYCNYTKFWYVNHTGFNVHSLPRCWLTKN |
| | | GSYLNVSDFRNQWLLESDHLISEILSREYEARQGKTPLGLVD |
| | | VCFWSTLFYVSSIFLHLLRIPTHRHIIGEGCPKPHRLSSNSVC |
| | | ACGLFKQKGRPLRWAGKV |
| 135 | Amino acid sequence of | MGQLISFFGEIPSIIHEALNIALIAVSIISILKGVINIWGSGLLQF |
| | the GP signal peptide of | IVFLLLAGRSCS |
| | WWAV | |
| 136 | Amino acid sequence of | YKIGHHVELQHIILNASYITPYVPMPCMINDTHFLLRGPFEAS |
| | the GP1 of WWAV | WAIKLEITDVTTLVVDTDNVANPTNISKCFANNQDERLLGF |
| | | TMEWFLSGLEHDHHFTPQIICGNVSKGEVNAQVNITMEDHC |
| | | SQVFLKMRRIFGVFKNPCTSHGKQNVLISVSNWTNQCSGNH |
| | | LSSMHLIVQNAYKQMIKSRTLK |
| 137 | Amino acid sequence of | SFFAWSLSDATGTDMPGGYCLEKWMLISSELKCFGNTAIAK |
| | GP2 of WWAV | CNLDHSSEFCDMLKLFEFNRNAIKTLQNDSKHQLDMIITAV |
| | | NSLISDNTLMKNRLKELINIPYCNYTKFWYVNHTGFNVHSL |
| | | PRCWLTKNGSYLNVSDFRNQWLLESDHLISEILSREYEARQ |
| | | GKTPLGLVDVCFWSTLFYVSSIFLHLLRIPTHRHIIGEGCPKP |
| | | HRLSSNSVCACGLFKQKGRPLRWAGKV |
| 138 | Amino acid sequence of | MSDQSVPSFRWTQSLRRGLSAWTTSVKADVLNDTRALLSG |
| | nucleoprotein of WWAV | LDFAKVASVQRMMRRVKRDDSDLVGLRDLNKEVDSLMIM |
| | | KSNQKNMFLKVGSLSKDELMELSSDLEKLKQKVQRTERVG |
| | | NGTGQYQGNLSNTQLTRRSEILQLVGIQRAGLAPTGGVVKI |
| | | WDIKDPSLLVNQFGSVPAVTISCMTEQGGESLNDVVQGLTD |
| | | LGLLYTAKYPNLNDLKALTTKHPSLNIITQEESQINISGYNLS |
| | | LSAAVKAGACLIDGGNMLETIKIEESTFTTVIKTLLEVKNKE |
| | | KMFVSPTPGQRNPYENVLYKLCLSGDGWPYIASRSQIKGRA |
| | | WDNTVVEFDTATVKEPIPIRNGGAPLLTTLKPEIENQVKRSV |
| | | ESLLINDTTWIDIEGPPNDPVEFAIYQPESQRYIHCYRRPNDI |
| | | KSFKDQSKYCHGILLKDVENARPGLISSIIRSLPKSMVFTAQG |
| | | ADDIRKLFDMHGRQDLKIVDVKLSAEESRIFEDLVWKRFEH |
| | | LCDKHKGIVIKSKKKGSTPATTNAHCALLDGVMFSAVISGS |
| | | VSNEKPKRMLPIDLLFREPETTVVL |
| 139 | Amino acid sequence of | MGLRYSKEVRDRYGDKEPEGRIPITLNMPQTLYGRYNCKSC |
| | the Z protein of WWAV | WFANKGLLKCSNHYLCLKCLTLMLGRSDYCGICGEVLPKK |
| | | LVFENSPSAPPYEA |
| 140 | Amino acid sequence of | MIDCSDRINELKDLVRRWVPDEEAYTEQKTIVLSQVNPSSVI |
| | the L protein of WWAV | TEGLKLLSMLIEIDSCLKHGCVFNKNKTVNQILKDHKIVGPT |
| | | LPDVVPDGFKVSGSTIILLETFVRVNQESFEQKYKYDFEKLM |
| | | QLSKDLNKCGLILVPVIDGRSNYYVDRFPDWVIERIRWLLL |
| | | KLMDSVKDSGESIEELEYNRLISSLSNMENQNLGLESLKALR |
| | | EEGLDYKAKLMGVIKDGTMSKMTASECRIGIAKIYDQFCLL |
| | | RDSGQYQDVYCETSRADMIKWLKTHKLISPISNGEGGPLNS |
| | | ERCGFCQNHMLRVIAELVQSKRASCTQLPAESKETLRHKKL |
| | | LSDCNKVKGLKVLNTRRHAILCLDVIVLNSLIEVIKSGVDSS |
| | | HFLINNHYKSVNDRLLSVDLIINKLERKLLKQPDWLKIVGRK |
| | | LNKSVKEQSLDYVTVWLKELDYEFWYEFKFEREHSGKCEK |
| | | PTLRYKKQNQDTCYQVKFGTDKVLNEGMFVDYLDALSSLS |
| | | LSMMNSMKTSSAPKLIINDEKNFYGTIQCEECYYQDLDNLY |
| | | NSILLYQKTGEKSRCYGLMLKDEEMTNAYKTGPSFYADPK |
| | | RFFLPIMSSTVILKTCLEMLSWLDWLSTAEINDVKTKLFTLV |
| | | VNILITPSKRVQIYLQGFRYFIMAFVNEFHFKKLDQKLSVQA |
| | | LTSAEQHVFVLMDELVVYLLEEALEENMAKIFKFVLNLSYL |
| | | CHFITKETPDRLTDQIKCFEKFLEPKIQFGSSFVNLDSSPNLC |
| | | KEDEEKFIMNLNKLFSKDLGVDDMENPGICKTILSLCVSCFN |
| | | CGILPINKVLDRDPQSPSFSSTALDISSNKSVVVPKLDEAGEV |
| | | ITHYDYQSLLSSVVVEMAQSFKDKLRFKLDRKSIQFAIYKRL |
| | | TNMVLKRRSHPKDHDDECAEEFEELLDEGTYKLINDIESNV |
| | | LECLNGMVTSPMKKDVKEQGAVRRYEGSDLLSTLWPREL |
| | | MGPILAETSLHEVKDFDPSIFSDGTYQDLCHSVFNSKFKKHF |
| | | FLDDVLRFCPLESLVKNLATKNYIEKDYFECFKYILISAGFD |
| | | NRVGRYDHRSRSRLGFKDAAYHVKEASRISLRESNSEAISK |
| | | RLDKSFFTNSSLRNLCFYSEESPTFQSTVSSSTGKLKFGLSYK |
| | | EQVGSNRELYVGDLNTKLTSRLIEDYFESITSESKFSCLNNEL |
| | | EFEKAILDMKSVVRLSGLAVSMDHSKWGPYMSPAIFNALFS |
| | | NLDLQLKDGTSIDKGPIENLLNWHLHKLVEVPYNVIEAYLK |
| | | GYTKRGLGLMDRMSNTICENFIFNWFARGVVPSHISSVLDM |
| | | GQGILHNTSDYYGLVTEQFIMLCLEQCFDVKMSAYTSSDDE |
| | | IILSNSFSLRNSDNESLNNLKCKELLEFHYYLSSKLNKFVSPK |
| | | TVAGSFASEFKSRFFIWSQEVPLLTKFVAAALHNVKAKSPH |
| | | QLAETIDTILDQCVANGVSIEIVKEISKRTNRLIKYSGHPIDPF |
| | | LCVVDTDLKDWVDGSRGYRLQRSIESAIGDDTQLSIIRNSCK |
| | | KLFFKIRSGNIQEEYLISALQSSPDECLRQMLSITEVNEQEIED |
| | | LVETRWLNLRTFGDLRLVLRTKIMSGTRILDREEIPSLIKSVQ |
| | | SKLSKNFVRGAKKIVTDAINKSAFQSSICSGFIGLCKSMGSK |
| | | CVRDGTGGFVYIKMLLREIKDHQACGICKPKLSVFCKSALD |
| | | RLPKYSRSLLWDYYSLVFTNACELGNWVFSEAMLPKRVPT |
| | | MVNPNFFWCVKPGSHTELEDKVNMNHVLYSIKRNFPDLFD |
| | | EHIAPFLSDLASLKISWVQRIKFLDLCVAMDMSSECLGVISHI |
| | | MRRKREESYIVKQNELSHAHVRDSNPLEGGFQLNSLEICRN |
| | | FLYQIIFESMLHPVLLTTSQFKKYFWYGEVELLPNDADHDL |
| | | GQLTQFIMDCKTLNISRCMSLDDLDVGYVHSKITLSDIFINLS |
| | | SFMHLLDWGSLNDYESFDDIILKTGQKQTPIEIGIVLSHIRRS |
| | | FKFKYDRKTNYHIECRLIIDKDEMMMNRWDEDNILEIEVSE |
| | | VQCFVSGSEGHHISLDGVGLIPLHPLFSGKELIDFNKLLVDQS |
| | | VEFRQTSTVFQRVRLDFRQHTKDLRNKFSYKFQGPEQGLSP |
| | | LHLYKGQIMERNTIVSRLDVPISSKSVFLALEALDPAEHTTFL |
| | | TSLHTYMKTRMSKSNPCFIRMTQEDLCLLIESYEAAFIGVLK |
| | | LESDWIEFGDFALCFSNSLNCIMIADDGGQFKLKGRKCRSAS |
| | | TCPRPLEIE |

TABLE 5
Assession number for specific arenaviruses

| | | GenBank | |
|---|---|---|---|
| | | Accession | |
| Virus name | Isolate | number | Ref. Seq. number |
| Allpahuayo virus | CHLP-2472 | L: AY216502; | L: NC_010249; |
| | | S: AY012687 | S: NC_010253 |
| Alxa virus | RtDs-AreV-IM2014 | L: KY432892; | |
| | | S: KY432893 | |
| Junín virus | XJ13 | L: AY358022; | L: NC_005080; |
| | | S: AY358023 | S: NC_005081 |
| Bear Canyon virus | AV A0070039 | L: AY924390; | L: NC_010255; |
| | | S: AY924391 | S: NC_010256 |
| Sabiá virus | SPH114202 | L: AY358026; | L: NC_006313; |
| | | S: U41071 | S: NC_006317 |
| Pichindé virus | AN3739 | L: AF427517; | L: NC_006439; |
| | | S: K02734 | S: NC_006447 |
| Chapare virus | 810419 | L: EU260464; | L: NC_010563; |
| | | S: EU260463 | S: NC_010562 |
| Lìjiāng virus | KS4 | L: MF414201; | |
| | | S: MF414202 | |
| Cupixi virus | BeAn 119303 | L: AY216519; | L: NC_010252; |
| | | S: AF512832 | S: NC_010254 |
| Flexal virus | BeAn 293022 | L: EU627611; | L: NC_010759; |
| | | S: AF512831 | S: NC_010757 |
| Gairo virus | TZ-27421 | L: KJ855307; | L: NC_026247; |
| | | S: KJ855308 | S: NC_026246 |
| Guanarito virus | INH-95551 | L: AY358024; | L: NC_005082; |
| | | S: AY129247 | S: NC_005077 |
| Ippy virus | Dak An B 188d | L: DQ328878; | L: NC_007906; |
| | | S: DQ328877 | S: NC_007905 |
| Lassa virus | Josiah | L: U73034; | L: NC_004297; |
| | | S: J04324 | S: NC_004296 |
| Latino virus | MARU 10924 | L: EU627612; | L: NC_010760; |
| | | S: AF512830 | S: NC_010758 |
| Loei River virus | R5074 | L: KC669693; | L: NC_038365; |
| | | S: KC669698 | S: NC_038364 |
| Lujo virus | R4356 | L: FJ952385; | L: NC_012777; |
| | | S: FJ952384 | S: NC_012776 |
| Luna virus | LSK-1 | L: AB586645; | L: NC_016153; |
| | | S: AB586644 | S: NC_016152 |
| Luli virus | SLW-1 | L: AB972431; | |
| | | S: AB972430 | |
| Lunk virus | NKS-1 | L: AB693151; | L: NC_018711; |
| | | S: AB693150 | S: NC_018710 |
| lymphocytic | Armstrong 53b | L: AY847351; | L: NC_004291; |
| choriomeningitis | | S: AY847350 | S: NC_004294 |
| virus | | | |
| Machupo virus | Carvallo | L: AY358021; | L: NC_005079; |
| | | S: AY129248 | S: NC_005078 |
| Mariental virus | N27 MrMi.n9 | L: KP867641; | L: NC_027136; |
| | | S: KM272987 | S: NC_027134 |
| Merino Walk virus | Merino Walk | L: GU078661; | L: NC_023763; |
| | | S: GU078660 | S: NC_023764 |
| mobala virus | Acar 3080 | L: DQ328876; | L: NC_007904; |
| | | S: AY342390 | S: NC_007903 |
| Mopeia virus | AN20410 | L: AY772169; | L: NC_006574; |
| | | S: AY772170 | S: NC_006575 |
| Morogoro virus | 3017/2004 | L: EU914104; | |
| | | S: EU914103 | |
| Okahandja virus | N73 OkhMi.n4 | L: KP867642; | L: NC_027137; |
| | | S: KM272988 | S: NC_027135 |
| Oliveros virus | 3229 | L: AY216514; | L: NC_010250; |
| | | S: U34248 | S: NC_010248 |
| Paraná virus | 12056 | L: EU627613; | L: NC_010761; |
| | | S: AF485261 | S: NC_010756 |
| Pirital virus | VAV-488 | L: AY494081; | L: NC_005897; |
| | | S: AF485262 | S: NC_005894 |
| Aporé virus | LBCE 12071 | L: MF317491; | L: NC_040763; |
| | | S: MF317490 | S: NC_040762 |
| Ryukyu virus | YN2013 | L: KM020190; | L: NC_039010; |
| | | S: KM020191 | S: NC_039009 |
| Amaparí virus | BeAn 70563 | L: AY216517; | L: NC_010251; |
| | | S: AF485256 | S: NC_010247 |
| Solwezi virus | 13ZR68 | L: AB972429; | L: NC_038366; |
| | | S: AB972428 | S: NC_038367 |
| souris virus | PREDICT-05775- | L: KP050226; | L: NC_039011; |
| | 5302-5304 | S: KP050227 | S: NC_039012 |
| Tacaribe virus | T.RVL.II 573 | L: J04340; | L: NC_004292; |
| | | S: M20304 | S: NC_004293 |
| Tamiami virus | W10777 | L: AY924393; | L: NC_010702; |
| | | S: AF485263 | S: NC_010701 |
| Wēnzhōu virus | Rn-242 | L: KJ909795; | L: NC_026019; |
| | | S: KJ909794 | S: NC_026018 |
| Whitewater Arroyo | AV 9310135 | L: AY924395; | L: NC_010703; |
| virus | | S: AF228063 | S: NC_010700 |
| Big Brushy Tank | AV D0390174 | L: EU938665; | |
| virus | | S: EF619035 | |
| Catarina virus | AV N0010001 | S: JX237768 | |
| Skinner Tank virus | AV D1000090 | L: EU938659; | |
| | | S: EU123328 | |
| Tonto Creek virus | AV D0390060 | L: EU938663; | |
| | | S: EF619034 | |
| Xapuri virus | LBCE 19881 | S: MG976578; | |
| | | L: MG976577 | |

S indicates the GenBank accession number or the sequence number of the S segment; L indicates GenBank accession number or the sequence number of the L segment

What is claimed:

1. A nucleotide sequence comprising a first open reading frame (ORF) and a second ORF, wherein one of the two ORFs is in sense orientation and the other ORF is in antisense orientation;
wherein the first ORF comprises a nucleotide sequence encoding a functional fragment of a first polypeptide, and the first ORF does not encode the full-length first polypeptide;
wherein the second ORF comprises a nucleotide sequence encoding:
a) a second polypeptide; or
b) a functional fragment of the first polypeptide, and the second ORF does not encode the full-length first polypeptide; or
c) a functional fragment of a second polypeptide, and the second ORF does not encode the full-length second polypeptide; or
d) a heterologous non-arenaviral polypeptide; and
wherein the first and second polypeptides are different from each other and selected from the group consisting of arenavirus GP, NP, Z and L.

2. The nucleotide sequence of claim 1, wherein the first ORF and the second ORF are separated by an arenavirus intergenic region (IGR) and each ORF is under control of an arenavirus 3′ untranslated region (UTR) or an arenavirus 5′ UTR.

3. The nucleotide sequence of any one of claims 1-2, wherein the first ORF further comprises a nucleotide sequence encoding a second heterologous non-arenaviral polypeptide or a third polypeptide; wherein the third polypeptide is different from the first polypeptide and second polypeptide and is selected from the group consisting of arenavirus GP, NP, Z and L; and wherein the heterologous non-arenaviral polypeptide and the second heterologous non-arenaviral polypeptide are the same or different from each other.

4. The nucleotide sequence of any one of claims 1-2, wherein the second ORF further comprises a nucleotide sequence encoding a second heterologous non-arenaviral polypeptide or a third polypeptide; wherein the third polypeptide is different from the first polypeptide and second polypeptide and is selected from the group consisting of arenavirus GP, NP, Z and L; and wherein the heterologous non-arenaviral polypeptide and the second heterologous non-arenaviral polypeptide are the same or different from each other.

5. The nucleotide sequence of any one of the claims above, wherein the arenavirus GP, NP, Z and L are from LCMV, Lassa virus, Pichinde virus, Oliveros virus, Tamiami virus, Mobala virus, Mopeia virus, Ippy virus, Amapari virus, Flexal virus, Guanarito virus, Latino virus, Machupo virus, Parana virus, Pirital virus, Sabia virus, Tacaribe virus, Bear Canyon virus, Whitewater Arroyo virus, Allpahuayo virus (ALLV), Alxa virus, Chapare virus, Lijiang virus, Cupixi virus, Gairo virus, Loei River virus, Lujo virus, Luna virus, Luli virus, Lunk virus, Mariental virus, Merino Walk virus, Morogoro virus, Okahandja virus, Aporé virus, Ryukyu virus, Solwezi virus, souris virus, Wenzhou virus, Big Brushy Tank virus, Catarina virus, Skinner Tank virus, Tonto Creek virus, Xapuri virus, or Junin virus.

6. A nucleotide sequence comprising an open reading frame (ORF), wherein the ORF comprises a nucleotide sequence encoding
a) a functional fragment of a first polypeptide, and
b) a heterologous non-arenaviral polypeptide or a second polypeptide;
wherein the ORF does not encode the full-length first polypeptide; and wherein the first and second polypeptides are different from each other and selected from the group consisting of arenavirus GP, NP, Z and L that are not from Lassa virus.

7. The nucleotide sequence of claim 6, wherein the first and second polypeptides are selected from the group consisting of arenavirus GP, NP, Z and L of LCMV, Pichinde virus, Oliveros virus, Tamiami virus, Mobala virus, Mopeia virus, Ippy virus, Amapari virus, Flexal virus, Guanarito virus, Latino virus, Machupo virus, Parana virus, Pirital virus, Sabia virus, Tacaribe virus, Bear Canyon virus, Whitewater Arroyo virus, Allpahuayo virus (ALLV), Alxa virus, Chapare virus, Lijiang virus, Cupixi virus, Gairo virus, Loei River virus, Lujo virus, Luna virus, Luli virus, Lunk virus, Mariental virus, Merino Walk virus, Morogoro virus, Okahandja virus, Aporé virus, Ryukyu virus, Solwezi virus, souris virus, Wenzhou virus, Big Brushy Tank virus, Catarina virus, Skinner Tank virus, Tonto Creek virus, Xapuri virus, or Junin virus.

8. The nucleotide sequence of any one of claims 6-7, wherein the ORF is a first ORF and the nucleotide sequence further comprises a second ORF comprising a nucleotide sequence encoding a third polypeptide, a functional fragment of the first polypeptide, a functional fragment of a third polypeptide, or a second heterologous non-arenaviral polypeptide; wherein the third polypeptide is different from the first polypeptide and the second polypeptide and selected from the group consisting of arenavirus GP, NP, Z and L; wherein one of the two ORFs is in sense orientation and the other ORF is in antisense orientation; wherein the second ORF does not encode the full-length first polypeptide; wherein the second ORF does not encode the full-length third polypeptide; and wherein the heterologous non-arenaviral polypeptide and the second heterologous non-arenaviral polypeptide are the same or different from each other.

9. The nucleotide sequence of any one of claims 1-5 and 8, wherein the second ORF comprises a nucleotide sequence encoding a functional fragment of the first polypeptide, and wherein the functional fragment encoded by the first ORF is different from the functional fragment encoded by the second ORF.

10. The nucleotide sequence of claim 6, wherein the nucleotide sequence does not further comprise a second ORF.

11. The nucleotide sequence of any one of the preceding claims, wherein the nucleotide sequence is an arenavirus genomic or antigenomic S segment.

12. The nucleotide sequence of any one of the preceding claims, wherein the nucleotide sequence is an arenavirus genomic or antigenomic L segment.

13. The nucleotide sequence of any one of claims 1-5, 8-9, and 11-12, wherein the first ORF is under control of an arenavirus 3′ UTR, and the second ORF is under control of an arenavirus 5′ UTR.

14. The nucleotide sequence of any one of claims 1-5, 8-9, and 11-12, wherein the first ORF is under control of an arenavirus 5′ UTR, and the second ORF is under control of an arenavirus 3′ UTR.

15. The nucleotide sequence of any one of claims 1-5, 8-9, and 11-12, wherein the first ORF comprises a nucleotide sequence encoding arenavirus GP signal peptide, either alone or fused to a heterologous non-arenaviral polypeptide.

16. The nucleotide sequence of claim 15, wherein the second ORF comprises a nucleotide sequence encoding a heterologous non-arenaviral signal peptide and the arenavirus GP1 and GP2.

17. The nucleotide sequence of claim 15, wherein the second ORF comprises a nucleotide sequence encoding a heterologous non-arenaviral polypeptide; wherein the heterologous non-arenaviral polypeptide encoded by the first ORF and the heterologous non-arenaviral polypeptide encoded by the second ORF are the same or different from each other.

18. The nucleotide sequence of any one of claims 16 and 17, wherein the first ORF is under control of an arenavirus 3′ UTR and the second ORF is under control of an arenavirus 5′ UTR.

19. The nucleotide sequence of any one of claims 1-5, 8-9, and 11-12, wherein the first ORF comprises a nucleotide sequence encoding a heterologous non-arenaviral signal peptide and the arenavirus GP1 and GP2.

20. The nucleotide sequence of claim 19, wherein the second ORF comprises a nucleotide sequence encoding NP.

21. The nucleotide sequence of claim 20, wherein the first ORF is under control of an arenavirus 5′ UTR and the second ORF is under control of an arenavirus 3′ UTR.

22. The nucleotide sequence of any one of the claims above, wherein the first polypeptide comprises an amino acid sequence that is at least 80%, 85%, 90%, 95%, 96%, 97%, 98%, 99% or 100% identical to the amino acid sequence of SEQ ID NO:1, SEQ ID NO:2, SEQ ID NO:3, SEQ ID NO:4, SEQ ID NO:5, SEQ ID NO:6, SEQ ID NO:7, SEQ ID NO:8, SEQ ID NO:9, SEQ ID NO:10, SEQ ID NO:11, SEQ ID NO:12, SEQ ID NO:13, SEQ ID NO:14, SEQ ID NO:15, SEQ ID NO:16, SEQ ID NO:17, SEQ ID NO:18, SEQ ID NO:19, SEQ ID NO:20, SEQ ID NO:21, SEQ ID NO:22, SEQ ID NO:23, SEQ ID NO:24, SEQ ID NO:48, SEQ ID NO:52, SEQ ID NO:59, SEQ ID NO:66, SEQ ID NO:73, SEQ ID NO:80, SEQ ID NO:84, SEQ ID NO:91, SEQ ID NO:98, SEQ ID NO:105, SEQ ID NO:109, SEQ ID NO:113, SEQ ID NO:120, SEQ ID NO:127, SEQ ID NO:134, SEQ ID NO:49, SEQ ID NO:56, SEQ ID NO:63, SEQ ID NO:70, SEQ ID NO:77, SEQ ID NO:81, SEQ ID NO:88, SEQ ID NO:95, SEQ ID NO:102, SEQ ID NO:106, SEQ ID NO:110, SEQ ID NO: 117, SEQ ID NO:124, SEQ ID NO:131, SEQ ID NO:138, SEQ ID NO:50, SEQ ID NO:57, SEQ ID NO:64, SEQ ID NO:71, SEQ ID NO:78, SEQ ID NO:82, SEQ ID NO:89, SEQ ID NO:96, SEQ ID NO:103, SEQ ID NO:107, SEQ ID NO:111, SEQ ID NO: 118, SEQ ID NO:125, SEQ ID NO:132, SEQ ID NO:139, SEQ ID NO:51, SEQ ID NO:58, SEQ ID NO:65, SEQ ID NO:72, SEQ ID NO:79, SEQ ID NO:83, SEQ ID NO:90, SEQ ID NO:97, SEQ ID NO:104, SEQ ID NO:108, SEQ ID NO: 112, SEQ ID NO: 119, SEQ ID NO:126, SEQ ID NO:133, or SEQ ID NO:140; wherein the second polypeptide comprises an amino acid sequence that is at least 80%, 85%, 90%, 95%, 96%, 97%, 98%, 99% or 100% identical to the amino acid sequence of SEQ ID NO:1, SEQ ID NO:2, SEQ ID NO:3, SEQ ID NO:4, SEQ ID NO:5, SEQ ID NO:6, SEQ ID NO:7, SEQ ID NO:8, SEQ ID NO:9, SEQ ID NO:10, SEQ ID NO: 11, SEQ ID NO:12, SEQ ID NO:13, SEQ ID NO:14, SEQ ID NO:15, SEQ ID NO:16, SEQ ID NO:17, SEQ ID NO:18, SEQ ID NO:19, SEQ ID NO:20, SEQ ID NO:21, SEQ ID NO:22, SEQ ID NO:23, SEQ ID NO:24, SEQ ID NO:48, SEQ ID NO:52, SEQ ID NO:59, SEQ ID NO:66, SEQ ID NO:73, SEQ ID NO:80, SEQ ID NO:84, SEQ ID NO:91, SEQ ID NO:98, SEQ ID NO:105, SEQ ID NO:109, SEQ ID NO:113, SEQ ID NO:120, SEQ ID NO:127, SEQ ID NO:134, SEQ ID NO:49, SEQ ID NO:56, SEQ ID NO:63, SEQ ID NO:70, SEQ ID NO:77, SEQ ID NO:81, SEQ ID NO:88, SEQ ID NO:95, SEQ ID NO:102, SEQ ID NO:106, SEQ ID NO:110, SEQ ID NO:117, SEQ ID NO:124, SEQ ID NO:131, SEQ ID NO:138, SEQ ID NO:50, SEQ ID NO:57, SEQ ID NO:64, SEQ ID NO:71, SEQ ID NO:78, SEQ ID NO:82, SEQ ID NO:89, SEQ ID NO:96, SEQ ID NO:103, SEQ ID NO:107, SEQ ID NO:111, SEQ ID NO: 118, SEQ ID NO:125, SEQ ID NO:132, SEQ ID NO:139, SEQ ID NO:51, SEQ ID NO:58, SEQ ID NO:65, SEQ ID NO:72, SEQ ID NO:79, SEQ ID NO:83, SEQ ID NO:90, SEQ ID NO:97, SEQ ID NO:104, SEQ ID NO:108, SEQ ID NO:112, SEQ ID NO:119, SEQ ID NO:126, SEQ ID NO:133, or SEQ ID NO:140; and wherein the third polypeptide comprises an amino acid sequence that is at least 80%, 85%, 90%, 95%, 96%, 97%, 98%, 99% or 100% identical to the amino acid sequence of SEQ ID NO:1, SEQ ID NO:2, SEQ ID NO:3, SEQ ID NO:4, SEQ ID NO:5, SEQ ID NO:6, SEQ ID NO:7, SEQ ID NO:8, SEQ ID NO:9, SEQ ID NO:10, SEQ ID NO:11, SEQ ID NO:12, SEQ ID NO:13, SEQ ID NO:14, SEQ ID NO:15, SEQ ID NO:16, SEQ ID NO:17, SEQ ID NO:18, SEQ ID NO:19, SEQ ID NO:20, SEQ ID NO:21, SEQ ID NO:22, SEQ ID NO:23, SEQ ID NO:24, SEQ ID NO:48, SEQ ID NO:52, SEQ ID NO:59, SEQ ID NO:66, SEQ ID NO:73, SEQ ID NO:80, SEQ ID NO:84, SEQ ID NO:91, SEQ ID NO:98, SEQ ID NO:105, SEQ ID NO:109, SEQ ID NO:113, SEQ ID NO:120, SEQ ID NO:127, SEQ ID NO:134, SEQ ID NO:49, SEQ ID NO:56, SEQ ID NO:63, SEQ ID NO:70, SEQ ID NO:77, SEQ ID NO:81, SEQ ID NO:88, SEQ ID NO:95, SEQ ID NO:102, SEQ ID NO:106, SEQ ID NO:110, SEQ ID NO: 117, SEQ ID NO:124, SEQ ID NO:131, SEQ ID NO:138, SEQ ID NO:50, SEQ ID NO:57, SEQ ID NO:64, SEQ ID NO:71, SEQ ID NO:78, SEQ ID NO:82, SEQ ID NO:89, SEQ ID NO:96, SEQ ID NO:103, SEQ ID NO:107, SEQ ID NO:111, SEQ ID NO: 118, SEQ ID NO:125, SEQ ID NO:132, SEQ ID NO:139, SEQ ID NO:51, SEQ ID NO:58, SEQ ID NO:65, SEQ ID NO:72, SEQ ID NO:79, SEQ ID NO:83, SEQ ID NO:90, SEQ ID NO:97, SEQ ID NO:104, SEQ ID NO:108, SEQ ID NO: 112, SEQ ID NO: 119, SEQ ID NO:126, SEQ ID NO:133, or SEQ ID NO:140.

23. The nucleotide sequence of any one of the claims above, wherein the first polypeptide comprises an amino acid sequence identical to SEQ ID NO:1, SEQ ID NO:2, SEQ ID NO:3, SEQ ID NO:4, SEQ ID NO:5, SEQ ID NO:6, SEQ ID NO:48, SEQ ID NO:52, SEQ ID NO:59, SEQ ID NO:66, SEQ ID NO:73, SEQ ID NO:80, SEQ ID NO:84, SEQ ID NO:91, SEQ ID NO:98, SEQ ID NO:105, SEQ ID NO:109, SEQ ID NO: 113, SEQ ID NO:120, SEQ ID NO:127, or SEQ ID NO:134.

24. The nucleotide sequence of any one of the claims above, wherein the functional fragment of the first polypeptide comprises an amino acid sequence that is at least 80%, 85%, 90%, 95%, 96%, 97%, 98%, 99% or 100% identical to the amino acid sequence of SEQ ID NO:25, SEQ ID NO:26, SEQ ID NO:27, SEQ ID NO:28, SEQ ID NO:29, SEQ ID NO:30, SEQ ID NO:31, SEQ ID NO:32, SEQ ID NO:33, SEQ ID NO:142, SEQ ID NO:34, SEQ ID NO:35, SEQ ID NO:36, SEQ ID NO:37, SEQ ID NO:38, SEQ ID NO:39, SEQ ID NO:40, SEQ ID NO:41, or SEQ ID NO:42, SEQ ID NO:53, SEQ ID NO:60, SEQ ID NO:67, SEQ ID NO:74, SEQ ID NO:85, SEQ ID NO:92, SEQ ID NO:99, SEQ ID NO:114, SEQ ID NO:121, SEQ ID NO:128, SEQ ID NO:135, SEQ ID NO:54, SEQ ID NO:61, SEQ ID NO:68, SEQ ID NO:75, SEQ ID NO:86, SEQ ID NO:93, SEQ ID NO:100, SEQ ID NO:115, SEQ ID NO:122, SEQ ID NO:129, SEQ ID NO:136, SEQ ID NO:55, SEQ ID NO:62, SEQ ID NO:69, SEQ ID NO:76, SEQ ID NO:87, SEQ ID NO:94, SEQ ID NO:101, SEQ ID NO:116, SEQ ID NO:123, SEQ ID NO:130, or SEQ ID NO:137.

25. The nucleotide sequence of any one of the claims above, wherein the functional fragment encoded by the first ORF or the second ORF is an arenavirus GP signal peptide or a functional fragment thereof.

26. The nucleotide sequence of any one of the claims above, wherein the heterologous non-arenaviral polypeptide, the second heterologous non-arenaviral polypeptide, or both heterologous non-arenaviral polypeptides are each an antigen derived from an infectious organism, tumor, or allergen.

27. The nucleotide sequence of claim 26, wherein the antigen is selected from the group consisting of
(a) viral antigens, wherein the viral antigen is from a virus family selected from the group consisting of adenoviridae, herpesviridae, leviviridae, orthomyxoviridae, parvoviridae, filoviridae, hantaviridae, poxviridae, papillomaviridae, polyomaviridae, paramyxoviridae, pneumoviridae, picornaviridae, reoviridae, retroviridae, flaviviridae, hepadnaviridae, togaviridae, rhabdoviridae, arenaviridae, and coronaviridae;
(b) bacterial antigens, wherein the bacterial antigen is from a bacteria family selected from the group consisting of Aquaspirillum family, Azospirillum family, Azotobacteraceae family, Bacteroidaceae family, Bartonellaceae family, Bdellovibrio family, Campylobacteraceae family, Chlamydiaceae family, Clostridiaceae family, Enterobacteriaceae family, Gardinella family, Pasteurellaceae family, Halobacteriaceae family, Helicobacter family, Legionallaceae family, Listeriaceae family, Methylococcaceae family, mycobacteriaceae, Neisseriaceae family, Oceanospirillum family, Pasteurellaceae family, Streptococcaceae family, Pseudomonadaceae family, Rhizobiaceae family, Spirillum family, Spirosomaceae family, Staphylococcaceae family, Helicobacter family, Yersinia family, Bacillus antracis and Vampirovibrio family, and
(c) tumor neoantigens or neo-epitopes and tumor associated antigens; and wherein the tumor associated antigen is selected from the group consisting of artificial fusion protein of HPV 16 E7 and E6 proteins, oncogenic viral antigens, cancer-testis antigens, oncofetal antigens, tissue differentiation antigens, mutant protein antigens, Adipophilin, AIM-2, ALDHIAI, BCLX (L), BING-4, CALCA, CD45, CPSF, cyclin DI, DKKI, ENAH (hMcna), Ga733 (EpCAM), EphA3, EZH2, FGF5, glypican-3, G250/MN/CAIX, HER-2/neu, IDOI, IGF2B3, IL13Ralpha2, Intestinal carboxyl esterase, alphafoetoprotein, Kallikrein 4, KIF20A, Lengsin, M-CSF, MCSP, mdm-2, Meloe, MMP-2, MMP-7, MUCl, MUC5AC, p53 (non-mutant), PAX5, PBF, PRAME, PSMA, RAGE, RAGE-I, RGS5, RhoC, RNF43, RU2AS, secernin 1, SOX10, STEAPI (six-transmembrane epithelial antigen of the prostate 1), survivin, Telomerase, VEGF, WT1, EGF-R, CEA, CD20, CD33, CD52, MELANA/MART1, MART2, NY-ESO-1, p53, MAGE Al, MAGE A3, MAGE-4, MAGE-5, MAGE-6, CDK4, alpha-actinin-4, ARTC1, BCR-ABL, BCR-ABL fusion protein (b3a2), B-RAF, CASP-5, CASP-8, beta-catenin, Cdc27, CDK4, CDKN2A, CLPP, COA-1, dek-can fusion protein, EFTUD2, Elongation factor 2, ETV6-AML, ETV6-AML1 fusion protein, FLT3-ITD, FN1, GPNMB, LDLR-fucosyltransferase fusion protein, NFYC, OGT, OS-9, pml-RARalpha fusion protein, PRDX5, PTPRK, H-ras, K-ras (V-Ki-ras2 Kirsten rat sarcoma viral oncogene), N-ras, RBAF600, SIRT2, SNRPDl, SSX, SSX2, SYT-SSX1 or -SSX2 fusion protein, TGFbetaRII, Triosephosphate isomerase, ormdm-2, LMP2, HPV E6, HPV E7, EGFRvIII (epidermal growth factor variant III), Idiotype, GD2, ganglioside G2), Ras-mutant, p53 (mutant), Proteinase3 (PRI), Tyrosinase, PSA, hTERT, Sarcoma translocation breakpoints, EphA2, prostatic acid phosphatase PAP, neo-PAP, ML-IAP, AFP, ERG (TMPRSS2 ETS Fusion gene), NAI 7, PAX3, ALK, Androgen Receptor, Cyclin B1, Polysialic acid, MYCN, TRP2, TRP2-Int2, GD3, Fucosyl GMI, Mesothelin, PSCA, sLe(a), cyp1B1, PLACI, GM3, BORIS, Tn, GLoboH, NY-BR-I, SART3, STn, Carbonic Anhydrase IX, OY-TESI, Sperm protein 17, LCK, high molecular weight melanoma-associated antigen (HMWMAA), AKAP-4, SSX2, XAGE 1, B7H3, Legumain, Tie 2, Page4, VEGFR2, MAD-CT-I, FAP, PDGFR-beta, MADCT-2, For-related antigen 1, TRPI, GP100, CA-125, CA19-9, Calretinin, Epithelial membrane antigen (EMA), Epithelial tumor antigen (ETA), CD19, CD34, CD99, CDI 17, Chromogranin, Cytokeratin, Desmin, Glial fibrillary acidic protein (GFAP), gross cystic disease fluid protein (GCDFP-15), HMB-45 antigen, Myo-DI, muscle-specific actin (MSA), neurofilament, neuronspecific enolase (NSE), placental alkaline phosphatase, synaptophysis, thyroglobulin, thyroid transcription factor-1, dimeric form of the pyruvate kinase isoenzyme type M2 (tumor M2-PK), BAGE BAGE-1, CAGE, CTAGE, FATE, GAGE, GAGE-I, GAGE-2, GAGE-3, GAGE-4, GAGE-5, GAGE-6, GAGE-7, HCA661, HOM-TES-85, MAGEA, MAGEB, MAGEC, NA88, NY-SAR-35, SPANXBI, SPAI 7, SSX, SYCP1, TPTE, Carbohydrate/ganglioside GM2 (oncofetal antigen-immunogenic-1 OFA-I-1), GM3, CA 15-3 (CA 27.29\BCAA), CA 195, CA 242, CA 50, CAM 43, CEA, EBNA, EF2, Epstein-Barr virus antigen, HLA-A2, HLA-Al 1, HSP70-2, KIAAO205, MUM-I, MUM-2, MUM-3, Myosin class I, GnTV, Herv-K-mel, LAGE-I, LAGE-2, (sperm protein) SPI 7, SCP-I, P15(58), Hom/Mel-40, E2A-PRL, H4-RET, IGH-IGK, MYL-RAR, TSP-180, P185erbB2, p180erbB-3, c-met, nm-23H1, TAG-72, TAG-72-4, CA-72-4, CAM 17.1, NuMa, 13-catenin, P16, TAGE, CT7, 43-9F, 5T4, 791Tgp72, 13HCG, BCA225, BTAA, CD68\KP1, CO-029, HTgp-175, M344, MG7-Ag, MOV18, NB\70K, NYCO-1, RCAS1, SDCCAG16, TA-90, TAAL6, TLP, TPS, CD22, CD27, CD30, CD70, prostein, TARP (T cell receptor gamma alternate reading frame protein), Trp-p8, integrin avβ3 (CD61), galactin, or Ral-B, CD123, CLL-1, CD38, CS-1, CD138, and ROR1.

28. The nucleotide sequence of any one of claims above, wherein the expression of the heterologous non-arenaviral polypeptide or the expression of the second heterologous non-arenaviral polypeptide is under control of an arenavirus 3′ UTR; and wherein the expression level of the heterologous non-arenaviral polypeptide or the expression level of the second heterologous non-arenaviral polypeptide is at least about 1%, 2%, 3%, 4%, 5%, 6%, 7%, 8%, 9%, 10%, 15%, 20%, 30%, 40%, 50%, 60%, 70%, 80%, 90%, 100%, 1.5-fold, 2-fold, 3-fold, 4-fold, 5-fold, 6-fold, 7-fold, 8-fold, 9-fold, 10-fold, 12-fold, 15-fold, 18-fold, 20-fold, 25-fold, or 30-fold higher than the expression level of the same heterologous non-arenaviral polypeptide or the expression level of the same second heterologous non-arenaviral polypeptide expressed under control of the respective arenavirus 5′ UTR.

29. A translation product of the nucleotide sequence of any one of claims 1-28.

30. An arenavirus particle containing a genome comprising the nucleotide sequence of any one of claims 1-28.

31. The arenavirus particle of claim 30, wherein the genome of the arenavirus particle consists of an S segment and an L segment.

32. The arenavirus particle of claim 30, wherein the arenavirus particle is tri-segmented.

33. The arenavirus particle of claim 32, wherein the tri-segmented arenavirus particle comprises two S segments and an L segment.

34. The arenavirus particle of claim 33, wherein the genome of the arenavirus particle consists of
a) an S segment that encodes arenavirus GP signal peptide and a heterologous non-arenaviral polypeptide or arenavirus GP signal peptide alone under the control of an arenavirus 3′ UTR and a heterologous non-arenaviral signal peptide, arenavirus GP1 and arenavirus GP2 under the control of an arenavirus 5′ UTR;
b) an S segment that encodes NP under the control of an arenavirus 3′ UTR and another heterologous non-arenaviral polypeptide or no polypeptide under the control of an arenavirus 5′ UTR; and
c) an L segment that encodes L protein under the control of an arenavirus 3′ UTR and Z protein under the control of an arenavirus 5′ UTR; and
wherein the two heterologous non-arenaviral polypeptides are the same or different from each other.

35. The arenavirus particle of claim 33, wherein the genome of the arenavirus particle consists of
a) an S segment that encodes arenavirus GP signal peptide and a heterologous non-arenaviral polypeptide or arenavirus GP signal peptide alone under the control of an arenavirus 3′ UTR and another heterologous non-arenaviral polypeptide or no polypeptide under the control of an arenavirus 5′ UTR;
b) an S segment that encodes NP under the control of an arenavirus 3′ UTR and a heterologous non-arenaviral signal peptide, arenavirus GP1 and arenavirus GP2 under the control of an arenavirus 5′ UTR; and
c) an L segment that encodes L protein under the control of an arenavirus 3′ UTR and Z protein under the control of an arenavirus 5′ UTR; and
wherein the two heterologous non-arenaviral polypeptides are the same or different from each other.

36. The arenavirus particle of claim 32, wherein the tri-segmented arenavirus particle comprises an S segment and two L segments.

37. The arenavirus particle of any one of claims 30-36, wherein the arenavirus particle is derived from a Lassa virus.

38. The arenavirus particle of any one of claims 30-36, wherein the arenavirus particle is derived from a Lymphocytic choriomeningitis virus (LCMV).

39. The arenavirus particle of claim 38, wherein the LCMV is a MP strain, a WE strain, an Armstrong strain, or an Armstrong Clone 13 strain.

40. The arenavirus particle of any one of claims 30-36, wherein the arenavirus particle is derived from a Pichinde virus (PICV).

41. The arenavirus particle of any one of claims 30-36, wherein the arenavirus particle is derived from a Junin virus vaccine Candid #1, or a Junin virus vaccine XJ Clone 3 strain.

42. The arenavirus particle of any one of claims 30-36, wherein the arenavirus particle is derived from an Oliveros virus.

43. The arenavirus particle of any one of claims 30-36, wherein the arenavirus particle is derived from a Tamiami virus.

44. The arenavirus particle of any one of claims 30-43, wherein the genome of the arenavirus particle encodes the heterologous non-arenaviral polypeptide and/or the second heterologous non-arenaviral polypeptide; wherein the growth or infectivity of the arenavirus particle is not inferior to a second arenavirus particle; wherein the genome of the second arenavirus particle encodes the same heterologous non-arenaviral polypeptide and/or the same second heterologous non-arenaviral polypeptide; and wherein all arenaviral GP, NP, Z and L in the second arenavirus particle are each expressed as one ORF.

45. The arenavirus particle of any one of claims 30-44, wherein the arenavirus particle is infectious and replication competent.

46. The arenavirus particle of any one of claims 30-45, wherein the arenavirus particle is attenuated as compared to its parental virus.

47. The arenavirus particle of any one of claims 30-44 wherein the arenavirus particle is infectious but unable to produce further infectious progeny in non-complementing cells.

48. The arenavirus particle of any one of claims 30-46, wherein the titer of the arenavirus particle is at least about 1%, 2%, 3%, 4%, 5%, 6%, 7%, 8%, 9%, 10%, 15%, 20%, 30%, 40%, 50%, 60%, 70%, 80%, 90%, 100%, 1.5-fold, 2-fold, 3-fold, 4-fold, 5-fold, 6-fold, 7-fold, 8-fold, 9-fold, 10-fold, 12-fold, 15-fold, 18-fold, 20-fold, 25-fold, or 30-fold lower during a persistent infection in AGRAG mice than the titer of the respective wild-type parental arenavirus particle.

49. The arenavirus particle of any one of claims 30-48, wherein the arenavirus particle expresses a heterologous non-arenaviral polypeptide under control of an arenavirus 3′ UTR; wherein the arenavirus particle induces at least about 1%, 2%, 3%, 4%, 5%, 6%, 7%, 8%, 9%, 10%, 15%, 20%, 30%, 40%, 50%, 60%, 70%, 80%, 90%, 100%, 1.5-fold, 2-fold, 3-fold, 4-fold, 5-fold, 6-fold, 7-fold, 8-fold, 9-fold, 10-fold, 12-fold, 15-fold, 18-fold, 20-fold, 25-fold, or 30-fold higher immune responses against the heterologous non-arenaviral polypeptide in a subject after the arenavirus particle is administered to the subject as compared to after another arenavirus particle expressing the same heterologous non-arenaviral polypeptide under control of an arenavirus 5′ UTR is administered to the subject or to a comparable subject.

50. The nucleotide sequence of any one of claims 1-10 and 13-28, wherein the nucleotide sequence is a DNA sequence; and wherein the DNA sequence can be transcribed into an arenavirus genomic or antigenomic segment.

51. A method of producing an arenavirus genomic or antigenomic RNA segment, wherein the method comprises transcribing the DNA sequence of claim 50.

52. A method of generating an arenavirus particle, wherein the method comprises:
a) transfecting into a host cell one or more DNA sequences of claim 50 or one or more RNA sequences each transcribed in vitro from the DNA sequence of claim 50;
b) transfecting into the host cell nucleotide sequences encoding arenavirus trans-acting factors;
c) maintaining the host cell under conditions suitable for virus formation; and
d) harvesting the arenavirus particle.

53. The method of claim 52, wherein the one or more DNA sequences are transcribed using a bidirectional promoter.

54. The method of any one of claims 52-53, wherein the one or more DNA sequences are transcribed under the control of a promoter selected from the group consisting of:
a) a RNA polymerase I promoter;
b) a RNA polymerase II promoter; and
c) a T7 promoter.

55. A DNA expression vector comprising the nucleotide sequence of claim 50.

56. A method of rescuing an arenavirus particle using the nucleotide sequence of any one of the claims 1-28 and 50.

57. A host cell comprising the nucleotide sequence of any one of the claims 1-28 and 50, the translation product of claim 29, the arenavirus particle of claims 30-49, or the DNA expression vector of claim 55.

58. A vaccine comprising the nucleotide sequence of any one of the claims 1-28 and 50, the translation product of claim 29, the arenavirus particle of claims 30-49, or the DNA expression vector of claim 55, and a pharmaceutically acceptable carrier.

59. A pharmaceutical composition comprising the nucleotide sequence of any one of the claims 1-28 and 50, the translation product of claim 29, the arenavirus particle of claims 30-49, or the DNA expression vector of claim 55, and a pharmaceutically acceptable carrier.

60. An arenavirus particle engineered such that an arenaviral ORF is separated over two or more mRNA transcripts.

61. The arenavirus particle of claim 60, wherein at least one of the mRNA transcripts comprises an internal ribosome entry site (IRES).

62. The arenavirus particle of any one of claims 60-61, wherein the mRNA transcripts can be transcribed from the arenavirus genomic or antigenomic segment.

63. The arenavirus particle of claim 62, wherein the arenavirus genomic or antigenomic segment is an S segment.

64. The arenavirus particle of claim 62, wherein the arenavirus genomic or antigenomic segment is an L segment.

65. The arenavirus particle of any one of claims 60-64, wherein the two or more mRNA transcripts are under control of an arenavirus 3′ UTR or an arenavirus 5′ UTR.

66. The arenavirus particle of any one of claims 60-65, wherein the arenaviral ORF encodes a polypeptide comprising an amino acid sequence that is at least 80%, 85%, 90%, 95%, 96%, 97%, 98%, 99% or 100% identical to the amino acid sequence of SEQ ID NO:1, SEQ ID NO:2, SEQ ID NO:3, SEQ ID NO:4, SEQ ID NO:5, SEQ ID NO:6, SEQ ID NO:7, SEQ ID NO:8, SEQ ID NO:9, SEQ ID NO:10, SEQ ID NO: 11, SEQ ID NO:12, SEQ ID NO:13, SEQ ID NO:14, SEQ ID NO:15, SEQ ID NO:16, SEQ ID NO:17, SEQ ID NO:18, SEQ ID NO:19, SEQ ID NO:20, SEQ ID NO:21, SEQ ID NO:22, SEQ ID NO:23, SEQ ID NO:24, SEQ ID NO:48, SEQ ID NO:52, SEQ ID NO:59, SEQ ID NO:66, SEQ ID NO:73, SEQ ID NO:80, SEQ ID NO:84, SEQ ID NO:91, SEQ ID NO:98, SEQ ID NO:105, SEQ ID NO:109, SEQ ID NO: 113, SEQ ID NO:120, SEQ ID NO:127, SEQ ID NO:134, SEQ ID NO:49, SEQ ID NO:56, SEQ ID NO:63, SEQ ID NO:70, SEQ ID NO:77, SEQ ID NO:81, SEQ ID NO:88, SEQ ID NO:95, SEQ ID NO:102, SEQ ID NO:106, SEQ ID NO:110, SEQ ID NO: 117, SEQ ID NO:124, SEQ ID NO:131, SEQ ID NO:138, SEQ ID NO:50, SEQ ID NO:57, SEQ ID NO:64, SEQ ID NO:71, SEQ ID NO:78, SEQ ID NO:82, SEQ ID NO:89, SEQ ID NO:96, SEQ ID NO:103, SEQ ID NO:107, SEQ ID NO:111, SEQ ID NO: 118, SEQ ID NO:125, SEQ ID NO:132, SEQ ID NO:139, SEQ ID NO:51, SEQ ID NO:58, SEQ ID NO:65, SEQ ID NO:72, SEQ ID NO:79, SEQ ID NO:83, SEQ ID NO:90, SEQ ID NO:97, SEQ ID NO:104, SEQ ID NO:108, SEQ ID NO: 112, SEQ ID NO: 119, SEQ ID NO:126, SEQ ID NO:133, or SEQ ID NO:140.

67. The arenavirus particle of any one of claims 60-66, wherein the arenaviral ORF encodes a polypeptide comprising an amino acid sequence that is identical to SEQ ID NO:1, SEQ ID NO:2, SEQ ID NO:3, SEQ ID NO:4, SEQ ID NO:5, SEQ ID NO:6, SEQ ID NO:48, SEQ ID NO:52, SEQ ID NO:59, SEQ ID NO:66, SEQ ID NO:73, SEQ ID NO:80, SEQ ID NO:84, SEQ ID NO:91, SEQ ID NO:98, SEQ ID NO:105, SEQ ID NO:109, SEQ ID NO:113, SEQ ID NO:120, SEQ ID NO:127, or SEQ ID NO:134.

68. The arenavirus particle of any one of claims 60-66, wherein the arenaviral ORF encodes arenavirus GP signal peptide, arenavirus GP1 and GP2 and wherein the arenavirus GP signal peptide or a functional fragment thereof is expressed from a first mRNA transcript and arenavirus GP1 and GP2 are expressed from a second mRNA transcript.

69. The arenavirus particle of claim 68, wherein the first mRNA transcript is under control of an arenavirus 3′ UTR.

70. The arenavirus particle of any one of claims 68-69, wherein the second mRNA transcript further encodes a heterologous non-arenaviral signal peptide.

71. The arenavirus particle of claim 70, wherein the heterologous non-arenaviral signal peptide is the signal peptide of the vesicular stomatitis virus serotype Indiana glycoprotein.

72. The arenavirus particle of any one of claims 68-71, wherein the first mRNA transcript further comprises a nucleotide sequence encoding a heterologous non-arenaviral polypeptide or arenavirus GP, NP, Z and L.

73. The arenavirus particle of claim 72, wherein the heterologous non-arenaviral polypeptide is an antigen derived from an infectious organism, tumor, or allergen.

74. The arenavirus particle of claim 73, wherein the antigen is selected from the group consisting of
(a) viral antigens, wherein the viral antigen is from a virus family selected from the group consisting of adenoviridae, herpesviridae, leviviridae, orthomyxoviridae, parvoviridae, filoviridae, hantaviridae, poxviridae, papillomaviridae, polyomaviridae, paramyxoviridae, pneumoviridae, picornaviridae, reoviridae, retroviridae, flaviviridae, hepadnaviridae, togaviridae, rhabdoviridae, arenaviridae, and coronaviridae;
(b) bacterial antigens, wherein the bacterial antigen is from a bacteria family selected from the group consisting of Aquaspirillum family, Azospirillum family, Azotobacteraceae family, Bacteroidaceae family, Bartonellaceae family, Bdellovibrio family, Campylobacteraceae family, Chlamydiaceae family, Clostridiaceae family, Enterobacteriaceae family, Gardinella family, Pasteurellaceae family, Halobacteriaceae family, Helicobacter family, Legionallaceae family, Listeriaceae family, Methylococcaceae family, mycobacteriaceae, Neisseriaceae family, Oceanospirillum family, Pasteurellaceae family, Streptococcaceae family, Pseudomonadaceae family, Rhizobiaceae family, Spirillum family, Spirosomaceae family, Staphylococcaceae family, Helicobacter family, Yersinia family, Bacillus antracis and Vampirovibrio family, and
(c) tumor neoantigens or neo-epitopes and tumor associated antigens; and wherein the tumor associated antigen is selected from the group consisting of artificial fusion protein of HPV 16 E7 and E6 proteins, oncogenic viral antigens, cancer-testis antigens, oncofetal antigens, tissue differentiation antigens, mutant protein antigens, Adipophilin, AIM-2, ALDHIAI, BCLX (L), BING-4, CALCA, CD45, CPSF, cyclin DI, DKKI, ENAH (hMcna), Ga733 (EpCAM), EphA3, EZH2, FGF5, glypican-3, G250/MN/CAIX, HER-2/neu, IDOI, IGF2B3, IL13Ralpha2, Intestinal carboxyl esterase, alphafoetoprotein, Kallikrein 4, KIF20A, Lengsin, M-CSF, MCSP, mdm-2, Meloe, MMP-2, MMP-7, MUCl, MUC5AC, p53 (non-mutant), PAX5, PBF, PRAME, PSMA, RAGE, RAGE-I, RGS5, RhoC, RNF43, RU2AS, secernin 1, SOX10, STEAPI (six-transmembrane epithelial antigen of the prostate 1), survivin, Telomerase, VEGF, WT1, EGF-R, CEA, CD20, CD33, CD52, MELANA/MART1, MART2, NY-ESO-1, p53, MAGE Al, MAGE A3, MAGE-4, MAGE-5, MAGE-6, CDK4, alpha-actinin-4, ARTC1, BCR-ABL, BCR-ABL fusion protein (b3a2), B-RAF, CASP-5, CASP-8, beta-catenin, Cdc27, CDK4, CDKN2A, CLPP, COA-1, dek-can fusion protein, EFTUD2, Elongation factor 2, ETV6-AML, ETV6-AML1 fusion protein, FLT3-ITD, FNl, GPNMB, LDLR-fucosyltransferase fusion protein, NFYC, OGT, OS-9, pml-RARalpha fusion protein, PRDX5, PTPRK, H-ras, K-ras (V-Ki-ras2 Kirsten rat sarcoma viral oncogene), N-ras, RBAF600, SIRT2, SNRPD1, SSX, SSX2, SYT-SSX1 or -SSX2 fusion protein, TGFbetaRII, Triosephosphate isomerase, ormdm-2, LMP2, HPV E6, HPV E7, EGFRvIII (epidermal growth factor variant III), Idiotype, GD2, ganglioside G2), Ras-mutant, p53 (mutant), Proteinase3 (PRI), Tyrosinase, PSA, hTERT, Sarcoma translocation breakpoints, EphA2, prostatic acid phosphatase PAP, neo-PAP, ML-IAP, AFP, ERG (TMPRSS2 ETS Fusion gene), NAI 7, PAX3, ALK, Androgen Receptor, Cyclin B1, Polysialic acid, MYCN, TRP2, TRP2-Int2, GD3, Fucosyl GMI, Mesothelin, PSCA, sLe(a), cyp1B1, PLACI, GM3, BORIS, Tn, GLoboH, NY-BR-I, SART3, STn, Carbonic Anhydrase IX, OY-TESI, Sperm protein 17, LCK, high molecular weight melanoma-associated antigen (HMWMAA), AKAP-4, SSX2, XAGE 1, B7H3, Legumain, Tie 2, Page4, VEGFR2, MAD-CT-I, FAP, PDGFR-beta, MADCT-2, For-related antigen 1, TRPI, GP100, CA-125, CA19-9, Calretinin, Epithelial membrane antigen (EMA), Epithelial tumor antigen (ETA), CD19, CD34, CD99, CDI 17, Chromogranin, Cytokeratin, Desmin, Glial fibrillary acidic protein (GFAP), gross cystic disease fluid protein (GCDFP-15), HMB-45 antigen, Myo-DI, muscle-specific actin (MSA), neurofilament, neuronspecific enolase (NSE), placental alkaline phosphatase, synaptophysis, thyroglobulin, thyroid transcription factor-1, dimeric form of the pyruvate kinase isoenzyme type M2 (tumor M2-PK), BAGE BAGE-1, CAGE, CTAGE, FATE, GAGE, GAGE-I, GAGE-2, GAGE-3, GAGE-4, GAGE-5, GAGE-6, GAGE-7, HCA661, HOM-TES-85, MAGEA, MAGEB, MAGEC, NA88, NY-SAR-35, SPANXBI, SPAI 7, SSX, SYCP1, TPTE, Carbohydrate/ganglioside GM2 (oncofetal antigen-immunogenic-1 OFA-I-1), GM3, CA 15-3 (CA 27.29\BCAA), CA 195, CA 242, CA 50, CAM 43, CEA, EBNA, EF2, Epstein-Barr virus antigen, HLA-A2, HLA-Al 1, HSP70-2, KIAAO205, MUM-I, MUM-2, MUM-3, Myosin class I, GnTV, Herv-K-mel, LAGE-I, LAGE-2, (sperm protein) SPI 7, SCP-I, P15(58), Hom/Mel-40, E2A-PRL, H4-RET, IGH-IGK, MYL-RAR, TSP-180, P185erbB2, p180erbB-3, c-met, nm-23H1, TAG-72, TAG-72-4, CA-72-4, CAM 17.1, NuMa, 13-catenin, P16, TAGE, CT7, 43-9F, 5T4, 791Tgp72, 13HCG, BCA225, BTAA, CD68\KP1, CO-029, HTgp-175, M344, MG7-Ag, MOV18, NB\70K, NYCO-1, RCAS1, SDCCAG16, TA-90, TAAL6, TLP, TPS, CD22, CD27, CD30, CD70, prostein, TARP (T cell receptor gamma alternate reading frame protein), Trp-p8, integrin avβ3 (CD61), galactin, or Ral-B, CD123, CLL-1, CD38, CS-1, CD138, and RORL.

75. The arenavirus particle of any one of claims 72-74, wherein the expression level of the heterologous non-arenaviral polypeptide expressed under control of an arenavirus 3′ UTR is at least about 1%, 2%, 3%, 4%, 5%, 6%, 7%, 8%, 9%, 10%, 15%, 20%, 30%, 40%, 50%, 60%, 70%, 80%, 90%, 100%, 1.5-fold, 2-fold, 3-fold, 4-fold, 5-fold, 6-fold, 7-fold, 8-fold, 9-fold, 10-fold, 12-fold, 15-fold, 18-fold, 20-fold, 25-fold, or 30-fold higher than the expression level of the same heterologous non-arenaviral polypeptide expressed under control of the respective arenavirus 5′ UTR.

76. The arenavirus particle of any one of claims 72-74, wherein the genome of the arenavirus particle encodes the heterologous non-arenaviral polypeptide; wherein the growth or infectivity of the arenavirus particle is not inferior to a second arenavirus particle; wherein the genome of the second arenavirus particle encodes the same heterologous non-arenaviral polypeptide; and wherein all arenaviral GP, NP, Z and L in the second arenavirus particle are each expressed as one ORF.

77. The arenavirus particle of any one of claims 60-76, wherein the genome of the arenavirus particle consists of an S segment and an L segment.

78. The arenavirus particle of any one of claims 60-76, wherein the arenavirus particle is tri-segmented.

79. The arenavirus particle of claim 78, wherein the tri-segmented arenavirus particle comprises two S segments and an L segment.

80. The arenavirus particle of claim 79, wherein the arenavirus particle comprises a genome organization as outlined in FIG. 4C.

81. The arenavirus particle of claim 79, wherein the arenavirus particle comprises a genome organization as outlined in FIG. 4E.

82. The arenavirus particle of claim 79, wherein the genome of the arenavirus particle consists of
a) an S segment that encodes arenavirus GP signal peptide and a heterologous non-arenaviral polypeptide or arenavirus GP signal peptide alone under the control of an arenavirus 3′ UTR and a heterologous non-arenaviral signal peptide, arenavirus GP1 and arenavirus GP2 under the control of an arenavirus 5′ UTR;
b) an S segment that encodes NP under the control of an arenavirus 3′ UTR and another heterologous non-arenaviral polypeptide or no polypeptide under the control of an arenavirus 5′ UTR; and
c) an L segment that encodes L protein under the control of an arenavirus 3′ UTR and Z protein under the control of an arenavirus 5′ UTR; and
wherein the two heterologous non-arenaviral polypeptides are the same or different from each other.

83. The arenavirus particle of claim 79, wherein the genome of the arenavirus particle consists of
a) an S segment that encodes arenavirus GP signal peptide and a heterologous non-arenaviral polypeptide or arenavirus GP signal peptide alone under the control of an arenavirus 3′ UTR and another heterologous non-arenaviral polypeptide or no polypeptide under the control of an arenavirus 5′ UTR;
b) an S segment that encodes NP under the control of an arenavirus 3′ UTR and a heterologous non-arenaviral signal peptide, arenavirus GP1 and arenavirus GP2 under the control of an arenavirus 5′ UTR; and
c) an L segment that encodes L protein under the control of an arenavirus 3′ UTR and Z protein under the control of an arenavirus 5′ UTR; and
wherein the two heterologous non-arenaviral polypeptides are the same or different from each other.

84. The arenavirus particle of claim 78, wherein the tri-segmented arenavirus particle comprises an S segment and two L segments.

85. The arenavirus particle of any one of claims 60-84, wherein the arenavirus particle is derived from a Lassa virus.

86. The arenavirus particle of any one of claims 60-84, wherein the arenavirus particle is derived from a Lymphocytic choriomeningitis virus (LCMV).

87. The arenavirus particle of claim 86, wherein the LCMV is a MP strain, a WE strain, an Armstrong strain, or an Armstrong Clone 13 strain.

88. The arenavirus particle of any one of claims 60-84, wherein the arenavirus particle is derived from a Pichinde virus (PICV).

89. The arenavirus particle of any one of claims 60-84, wherein the arenavirus particle is derived from a Junin virus vaccine Candid #1, or a Junin virus vaccine XJ Clone 3 strain.

90. The arenavirus particle of any one of claims 60-84, wherein the arenavirus particle is derived from an Oliveros virus.

91. The arenavirus particle of any one of claims 60-84, wherein the arenavirus particle is derived from a Tamiami virus.

92. The arenavirus particle of any one of claims 60-91, wherein the arenavirus particle is infectious and replication competent.

93. The arenavirus particle of any one of claims 60-92, wherein the arenavirus particle is attenuated as compared to its parental wild-type virus.

94. The arenavirus particle of any one of claims 60-91, wherein the arenavirus particle is infectious but unable to produce further infectious progeny in non-complementing cells.

95. The arenavirus particle of any one of claims 60-93, wherein the titer of the arenavirus particle is at least about 1%, 2%, 3%, 4%, 5%, 6%, 7%, 8%, 9%, 10%, 15%, 20%, 30%, 40%, 50%, 60%, 70%, 80%, 90%, 100%, 1.5-fold, 2-fold, 3-fold, 4-fold, 5-fold, 6-fold, 7-fold, 8-fold, 9-fold, 10-fold, 12-fold, 15-fold, 18-fold, 20-fold, 25-fold, or 30-fold lower during a persistent infection in AGRAG mice than the titer of the respective wild-type parental arenavirus particle.

96. The arenavirus particle of any one of claims 60-95, wherein the arenavirus particle expresses a heterologous non-arenaviral polypeptide under control of an arenavirus 3′ UTR; wherein the arenavirus particle induces at least about 1%, 2%, 3%, 4%, 5%, 6%, 7%, 8%, 9%, 10%, 15%, 20%, 30%, 40%, 50%, 60%, 70%, 80%, 90%, 100%, 1.5-fold, 2-fold, 3-fold, 4-fold, 5-fold, 6-fold, 7-fold, 8-fold, 9-fold, 10-fold, 12-fold, 15-fold, 18-fold, 20-fold, 25-fold, or 30-fold higher immune responses against the heterologous non-arenaviral polypeptide in a subject after administration of the arenavirus particle to the subject as compared to after another arenavirus particle expressing the same heterologous non-arenaviral polypeptide under control of an arenavirus 5′ UTR is administered to the subject or to a comparable subject.

97. A translation product of any one of the mRNA transcripts of the genome of the arenavirus particle of any one of claims 60-96.

98. A cDNA of the mRNA transcript of the genome of the arenavirus particle of any one of claims 60-96, wherein the cDNA can be transcribed into an arenavirus genomic or antigenomic segment.

99. A method of producing an arenavirus genomic or antigenomic segment, wherein the method comprises transcribing the cDNA of claim 98.

100. A method of generating an arenavirus particle, wherein the method comprises:
a) transfecting into a host cell one or more cDNA sequences of claim 98 or one or more RNA sequences each transcribed in vitro from the cDNA sequence of claim 98;
b) transfecting into the host cell nucleotide sequences encoding arenavirus trans-acting factors;
c) maintaining the host cell under conditions suitable for virus formation; and
d) harvesting the arenavirus particle.

101. The method of claim 100, wherein the one or more cDNA sequences are transcribed using a bidirectional promoter.

102. The method of any one of claims 100-101, wherein the one or more cDNA sequences are transcribed under the control of a promoter selected from the group consisting of:
a) a RNA polymerase I promoter;
b) a RNA polymerase II promoter; and
c) a T7 promoter.

103. A DNA expression vector comprising the DNA sequence encoding the mRNA transcript of the genome of the arenavirus particle of any one of claims 60-96.

104. A method of rescuing an arenavirus particle using the mRNA transcript of the genome of the arenavirus particle of any one of the claims 60-96 or the cDNA sequence thereof.

105. A host cell comprising the arenavirus particle of any one of claims 60-96, the translation product of claim 97, the cDNA of claim 98, or the DNA expression vector of claim 103.

106. A vaccine comprising the arenavirus particle of any one of claims 60-96, the translation product of claim 97, the cDNA of claim 98, or the DNA expression vector of claim 103, and a pharmaceutically acceptable carrier.

107. A pharmaceutical composition comprising the arenavirus particle of any one of claims 60-96, the translation product of claim 97, the cDNA of claim 98, or the DNA expression vector of claim 103, and a pharmaceutically acceptable carrier.

108. An arenavirus genomic or antigenomic segment engineered such that the viral transcription thereof results in a first mRNA transcript and a second mRNA transcript, wherein the first mRNA transcript comprises a nucleotide sequence encoding a functional fragment of a first polypeptide, and the first mRNA transcript does not encode the full-length first polypeptide;
wherein the second mRNA transcript comprises a nucleotide sequence encoding:
a) a second polypeptide; or
b) a functional fragment of the first polypeptide, and the second mRNA transcript does not encode the full-length first polypeptide; or
c) a functional fragment of a second polypeptide, and the second mRNA transcript does not encode the full-length second polypeptide; or
d) a heterologous non-arenaviral polypeptide; and
wherein the first and second polypeptides are different from each other and selected from the group consisting of arenavirus GP, NP, Z and L.

109. The arenavirus genomic or antigenomic segment of claim 108, wherein the first mRNA transcript further comprises a nucleotide sequence encoding a second heterologous non-arenaviral polypeptide or a third polypeptide, wherein the third polypeptide is different from the first polypeptide and the second polypeptide and is selected from the group consisting of arenavirus GP, NP, Z and L; and wherein the heterologous non-arenaviral polypeptide and the second heterologous non-arenaviral polypeptide are the same or different from each other.

110. The arenavirus genomic or antigenomic segment of claim 108, wherein the second mRNA transcript further comprises a nucleotide sequence encoding a second heterologous non-arenaviral polypeptide or a third polypeptide, wherein the third polypeptide is different from the first polypeptide and the second polypeptide and is selected from the group consisting of arenavirus GP, NP, Z and L; and wherein the heterologous non-arenaviral polypeptide and the second heterologous non-arenaviral polypeptide are the same or different from each other.

111. The arenavirus genomic or antigenomic segment of any one of claims 108-110, wherein the arenavirus GP, NP, Z and L are from LCMV, Lassa virus, Pichinde virus, Oliveros virus, Tamiami virus, Mobala virus, Mopeia virus, Ippy virus, Amapari virus, Flexal virus, Guanarito virus, Latino virus, Machupo virus, Parana virus, Pirital virus, Sabia virus, Tacaribe virus, Bear Canyon virus, Whitewater Arroyo virus, Allpahuayo virus (ALLV), Alxa virus, Chapare virus, Lijiang virus, Cupixi virus, Gairo virus, Loei River virus, Lujo virus, Luna virus, Luli virus, Lunk virus, Mariental virus, Merino Walk virus, Morogoro virus, Okahandja virus, Aporé virus, Ryukyu virus, Solwezi virus, souris virus, Wenzhou virus, Big Brushy Tank virus, Catarina virus, Skinner Tank virus, Tonto Creek virus, Xapuri virus, or Junin virus.

112. An arenavirus genomic or antigenomic segment engineered such that the viral transcription thereof results in an mRNA transcript encoding:
a) a functional fragment of a first polypeptide, and
b) a heterologous non-arenaviral polypeptide or a second polypeptide;
wherein the mRNA transcript does not encode the full-length first polypeptide; and wherein the first and second polypeptides are different from each other and selected from the group consisting of arenavirus GP, NP, Z and L.

113. The arenavirus genomic or antigenomic segment of claim 112, wherein the mRNA transcript is a first mRNA transcript; wherein the viral transcription of the arenavirus genomic or antigenomic segment further results in a second mRNA transcript; wherein the second mRNA transcript comprises a nucleotide sequence encoding a third polypeptide; a functional fragment of the first polypeptide; a functional fragment of a third polypeptide; or a second heterologous non-arenaviral polypeptide; wherein the third polypeptide is different from the first and the second polypeptide and selected from the group consisting of arenavirus GP, NP, Z and L, wherein the second mRNA transcript does not encode the full-length first polypeptide, wherein the second mRNA transcript does not encode the full-length third polypeptide and wherein the heterologous non-arenaviral polypeptide and the second heterologous non-arenaviral polypeptide are the same or different from each other.

114. The arenavirus genomic or antigenomic segment of any one of claims 108-111 and 113, wherein the second mRNA transcript comprises a nucleotide sequence encoding a functional fragment of a first polypeptide, and wherein the functional fragment encoded by the first mRNA transcript is different from the functional fragment encoded by the second mRNA transcript.

115. The arenavirus genomic or antigenomic segment of claim 112, wherein the viral transcription thereof does not further result in a second mRNA transcript.

116. The arenavirus genomic or antigenomic segment of any one of claims 108-115, wherein the mRNA transcript comprises an internal ribosome entry site (IRES).

117. The arenavirus genomic or antigenomic segment of any one of claims 108-116, wherein the arenavirus genomic or antigenomic segment is an S segment.

118. The arenavirus genomic or antigenomic segment of any one of claims 108-116, wherein the arenavirus genomic or antigenomic segment is an L segment.

119. The arenavirus genomic or antigenomic segment of any one of claims 108-118, wherein the functional fragment is under control of an arenavirus 3′ UTR.

120. The arenavirus genomic or antigenomic segment of any one of claims 108-118, wherein the functional fragment is under control of an arenavirus 5′ UTR.

121. The arenavirus genomic or antigenomic segment of any one of claims 108-120, wherein the first, second and third polypeptide each comprises an amino acid sequence that is at least 80%, 85%, 90%, 95%, 96%, 97%, 98%, 99% or 100% identical to the amino acid sequence of SEQ ID NO:1, SEQ ID NO:2, SEQ ID NO:3, SEQ ID NO:4, SEQ ID NO:5, SEQ ID NO:6, SEQ ID NO:7, SEQ ID NO:8, SEQ ID NO:9, SEQ ID NO:10, SEQ ID NO: 11, SEQ ID NO:12, SEQ ID NO:13, SEQ ID NO:14, SEQ ID NO:15, SEQ ID NO:16, SEQ ID NO:17, SEQ ID NO:18, SEQ ID NO:19, SEQ ID NO:20, SEQ ID NO:21, SEQ ID NO:22, SEQ ID NO:23, SEQ ID NO:24, SEQ ID NO:48, SEQ ID NO:52, SEQ ID NO:59, SEQ ID NO:66, SEQ ID NO:73, SEQ ID NO:80, SEQ ID NO:84, SEQ ID NO:91, SEQ ID NO:98, SEQ ID NO:105, SEQ ID NO:109, SEQ ID NO:113, SEQ ID NO:120, SEQ ID NO:127, SEQ ID NO:134, SEQ ID NO:49, SEQ ID NO:56, SEQ ID NO:63, SEQ ID NO:70, SEQ ID NO:77, SEQ ID NO:81, SEQ ID NO:88, SEQ ID NO:95, SEQ ID NO:102, SEQ ID NO:106, SEQ ID NO:110, SEQ ID NO:117, SEQ ID NO:124, SEQ ID NO:131, SEQ ID NO:138, SEQ ID NO:50, SEQ ID NO:57, SEQ ID NO:64, SEQ ID NO:71, SEQ ID NO:78, SEQ ID NO:82, SEQ ID NO:89, SEQ ID NO:96, SEQ ID NO:103, SEQ ID NO:107, SEQ ID NO:111, SEQ ID NO: 118, SEQ ID NO:125, SEQ ID NO:132, SEQ ID NO:139, SEQ ID NO:51, SEQ ID NO:58, SEQ ID NO:65, SEQ ID NO:72, SEQ ID NO:79, SEQ ID NO:83, SEQ ID NO:90, SEQ ID NO:97, SEQ ID NO:104, SEQ ID NO:108, SEQ ID NO:112, SEQ ID NO:119, SEQ ID NO:126, SEQ ID NO:133, or SEQ ID NO:140.

122. The arenavirus genomic or antigenomic segment of any one of the claims 108-121, wherein the first polypeptide comprises an amino acid sequence identical to SEQ ID NO:1, SEQ ID NO:2, SEQ ID NO:3, or SEQ ID NO:4, SEQ ID NO:5, SEQ ID NO:6, SEQ ID NO:48, SEQ ID NO:52, SEQ ID NO:59, SEQ ID NO:66, SEQ ID NO:73, SEQ ID NO:80, SEQ ID NO:84, SEQ ID NO:91, SEQ ID NO:98, SEQ ID NO:105, SEQ ID NO:109, SEQ ID NO:113, SEQ ID NO:120, SEQ ID NO:127, or SEQ ID NO:134.

123. The arenavirus genomic or antigenomic segment of any one of the claims 108-122, wherein the functional fragment of the first polypeptide comprises an amino acid sequence that is at least 80%, 85%, 90%, 95%, 96%, 97%, 98%, 99% or 100% identical to the amino acid sequence of SEQ ID NO:25, SEQ ID NO:26, SEQ ID NO:27, SEQ ID NO:28, SEQ ID NO:29, SEQ ID NO:30, SEQ ID NO:31, SEQ ID NO:32, SEQ ID NO:33, SEQ ID NO:142, SEQ ID NO:34, SEQ ID NO:35, SEQ ID NO:36, SEQ ID NO:37, SEQ ID NO:38, SEQ ID NO:39, SEQ ID NO:40, SEQ ID NO:41, SEQ ID NO:42, SEQ ID NO:53, SEQ ID NO:60, SEQ ID NO:67, SEQ ID NO:74, SEQ ID NO:85, SEQ ID NO:92, SEQ ID NO:99, SEQ ID NO:114, SEQ ID NO:121, SEQ ID NO:128, SEQ ID NO:135, SEQ ID NO:54, SEQ ID NO:61, SEQ ID NO:68, SEQ ID NO:75, SEQ ID NO:86, SEQ ID NO:93, SEQ ID NO:100, SEQ ID NO:115, SEQ ID NO:122, SEQ ID NO:129, SEQ ID NO:136, SEQ ID NO:55, SEQ ID NO:62, SEQ ID NO:69, SEQ ID NO:76, SEQ ID NO:87, SEQ ID NO:94, SEQ ID NO:101, SEQ ID NO:116, SEQ ID NO:123, SEQ ID NO:130, or SEQ ID NO:137.

124. The arenavirus genomic or antigenomic segment of any one of the claims 108-123, wherein the functional fragment is an arenavirus GP signal peptide or a functional fragment thereof.

125. The arenavirus genomic or antigenomic segment of any one of claims 108-124, wherein the heterologous non-arenaviral polypeptide, the second heterologous non-arenaviral polypeptide, or both heterologous non-arenaviral polypeptides are each an antigen derived from an infectious organism, tumor, or allergen.

126. The arenavirus genomic or antigenomic segment of claim 125, wherein the antigen is selected from the group consisting of
(a) viral antigens, wherein the viral antigen is from a virus family selected from the group consisting of adenoviridae, herpesviridae, leviviridae, orthomyxoviridae, parvoviridae, filoviridae, hantaviridae, poxviridae, papillomaviridae, polyomaviridae, paramyxoviridae, pneumoviridae, picornaviridae, reoviridae, retroviridae, flaviviridae, hepadnaviridae, togaviridae, rhabdoviridae, arenaviridae, and coronaviridae;
(b) bacterial antigens, wherein the bacterial antigen is from a bacteria family selected from the group consisting of Aquaspirillum family, Azospirillum family, Azotobacteraceae family, Bacteroidaceae family, Bartonellaceae family, Bdellovibrio family, Campylobacteraceae family, Chlamydiaceae family, Clostridiaceae family, Enterobacteriaceae family, Gardinella family, Pasteurellaceae family, Halobacteriaceae family, Helicobacter family, Legionallaceae family, Listeriaceae family, Methylococcaceae family, mycobacteriaceae, Neisseriaceae family, Oceanospirillum family, Pasteurellaceae family, Streptococcaceae family, Pseudomonadaceae family, Rhizobiaceae family, Spirillum family, Spirosomaceae family, Staphylococcaceae family, Helicobacter family, Yersinia family, Bacillus antracis and Vampirovibrio family, and
(c) tumor neoantigens or neo-epitopes and tumor associated antigens; and wherein the tumor associated antigen is selected from the group consisting of artificial fusion protein of HPV 16 E7 and E6 proteins, oncogenic viral antigens, cancer-testis antigens, oncofetal antigens, tissue differentiation antigens, mutant protein antigens, Adipophilin, AIM-2, ALDHIAI, BCLX (L), BING-4, CALCA, CD45, CPSF, cyclin DI, DKKI, ENAH (hMcna), Ga733 (EpCAM), EphA3, EZH2, FGF5, glypican-3, G250/MN/CAIX, HER-2/neu, IDOI, IGF2B3, IL13Ralpha2, Intestinal carboxyl esterase, alphafoetoprotein, Kallikrein 4, KIF20A, Lengsin, M-CSF, MCSP, mdm-2, Meloe, MMP-2, MMP-7, MUCl, MUC5AC, p53 (non-mutant), PAX5, PBF, PRAME, PSMA, RAGE, RAGE-I, RGS5, RhoC, RNF43, RU2AS, secernin 1, SOX10, STEAPI (six-transmembrane epithelial antigen of the prostate 1), survivin, Telomerase, VEGF, WT1, EGF-R, CEA, CD20, CD33, CD52, MELANA/MART1, MART2, NY-ESO-1, p53, MAGE Al, MAGE A3, MAGE-4, MAGE-5, MAGE-6, CDK4, alpha-actinin-4, ARTC1, BCR-ABL, BCR-ABL fusion protein (b3a2), B-RAF, CASP-5, CASP-8, beta-catenin, Cdc27, CDK4, CDKN2A, CLPP, COA-1, dek-can fusion protein, EFTUD2, Elongation factor 2, ETV6-AML, ETV6-AML1 fusion protein, FLT3-ITD, FNl, GPNMB, LDLR-fucosyltransferase fusion protein, NFYC, OGT, OS-9, pml-RARalpha fusion protein, PRDX5, PTPRK, H-ras, K-ras (V-Ki-ras2 Kirsten rat sarcoma viral oncogene), N-ras, RBAF600, SIRT2, SNRPDl, SSX, SSX2, SYT-SSX1 or -SSX2 fusion protein, TGFbetaRII, Triosephosphate isomerase, ormdm-2, LMP2, HPV E6, HPV E7, EGFRvIII (epidermal growth factor variant III), Idiotype, GD2, ganglioside G2), Ras-mutant, p53 (mutant), Proteinase3 (PRI), Tyrosinase, PSA, hTERT, Sarcoma translocation breakpoints, EphA2, prostatic acid phosphatase PAP, neo-PAP, ML-IAP, AFP, ERG (TMPRSS2 ETS Fusion gene), NAI 7, PAX3, ALK, Androgen Receptor, Cyclin B1, Polysialic acid, MYCN, TRP2, TRP2-Int2, GD3, Fucosyl GMI, Mesothelin, PSCA, sLe(a), cyp1B1, PLACI, GM3, BORIS, Tn, GLoboH, NY-BR-I, SART3, STn, Carbonic Anhydrase IX, OY-TESI, Sperm protein 17, LCK, high molecular weight melanoma-associated antigen (HMWMAA), AKAP-4, SSX2, XAGE 1, B7H3, Legumain, Tie 2, Page4, VEGFR2, MAD-CT-I, FAP, PDGFR-beta, MADCT-2, For-related antigen 1, TRPI, GP100, CA-125, CA19-9, Calretinin, Epithelial membrane antigen (EMA), Epithelial tumor antigen (ETA), CD19, CD34, CD99, CDI 17, Chromogranin, Cytokeratin, Desmin, Glial fibrillary acidic protein (GFAP), gross cystic disease fluid protein (GCDFP-15), HMB-45 antigen, Myo-D1, muscle-specific actin (MSA), neurofilament, neuronspecific enolase (NSE), placental alkaline phosphatase, synaptophysis, thyroglobulin, thyroid transcription factor-1, dimeric form of the pyruvate kinase isoenzyme type M2 (tumor M2-PK), BAGE BAGE-1, CAGE, CTAGE, FATE, GAGE, GAGE-I, GAGE-2, GAGE-3, GAGE-4, GAGE-5, GAGE-6, GAGE-7, HCA661, HOM-TES-85, MAGEA, MAGEB, MAGEC, NA88, NY-SAR-35, SPANXBI, SPAI 7, SSX, SYCP1, TPTE, Carbohydrate/ganglioside GM2 (oncofetal antigen-immunogenic-1 OFA-I-1), GM3, CA 15-3 (CA 27.29\BCAA), CA 195, CA 242, CA 50, CAM 43, CEA, EBNA, EF2, Epstein-Barr virus antigen, HLA-A2, HLA-Al 1, HSP70-2, KIAAO205, MUM-I, MUM-2, MUM-3, Myosin class I, GnTV, Herv-K-mel, LAGE-I, LAGE-2, (sperm protein) SPI 7, SCP-I, P15(58), Hom/Mel-40, E2A-PRL, H4-RET, IGH-IGK, MYL-RAR, TSP-180, P185erbB2, p180erbB-3, c-met, nm-23H1, TAG-72, TAG-72-4, CA-72-4, CAM 17.1, NuMa, 13-catenin, P16, TAGE, CT7, 43-9F, 5T4, 791Tgp72, 13HCG, BCA225, BTAA, CD68\KP1, CO-029, HTgp-175, M344, MG7-Ag, MOV18, NB\70K, NYCO-1, RCAS1, SDCCAG16, TA-90, TAAL6, TLP, TPS, CD22, CD27, CD30, CD70, prostein, TARP (T cell receptor gamma alternate reading frame protein), Trp-p8, integrin avβ3 (CD61), galactin, or Ral-B, CD123, CLL-1, CD38, CS-1, CD138, and ROR1.

127. The arenavirus genomic or antigenomic segment of any one of claims 108-111 and 113-126, wherein the first mRNA transcript comprises a nucleotide sequence encoding arenavirus GP signal peptide, either alone or fused to a heterologous non-arenaviral polypeptide.

128. The arenavirus genomic or antigenomic segment of claim 127, wherein the second mRNA transcript comprises a nucleotide sequence encoding a heterologous non-arenaviral signal peptide and the arenavirus GP1 and GP2.

129. The arenavirus genomic or antigenomic segment of any one of claims 127-128, wherein the first mRNA transcript is under control of an arenavirus 3′ UTR and the second mRNA transcript is under control of an arenavirus 5′ UTR.

130. The arenavirus genomic or antigenomic segment of claim 127, wherein the second mRNA transcript comprises a nucleotide sequence encoding a heterologous non-arenaviral polypeptide; wherein the heterologous non-arenaviral polypeptide encoded by the first mRNA transcript and the heterologous non-arenaviral polypeptide encoded by the second mRNA transcript are the same or different from each other.

131. The arenavirus genomic or antigenomic segment of any one of claims 127 and 130, wherein the first mRNA transcript is under control of an arenavirus 3′ UTR and the second mRNA transcript is under control of an arenavirus 5′ UTR.

132. The arenavirus genomic or antigenomic segment of any one of claims 108-111 and 113-126, wherein the first mRNA transcript comprises a nucleotide sequence encoding a heterologous non-arenaviral signal peptide and the arenavirus GP1 and GP2.

133. The arenavirus genomic or antigenomic segment of claim 132, wherein the second mRNA transcript comprises a nucleotide sequence encoding NP.

134. The arenavirus genomic or antigenomic segment of any one of claims 132-133, wherein the first mRNA transcript is under control of an arenavirus 5′ UTR and the second mRNA transcript is under control of an arenavirus 3′ UTR.

135. The arenavirus genomic or antigenomic segment of any one of claims 108-134, wherein the expression level of the heterologous non-arenaviral polypeptide expressed under control of an arenavirus 3′ UTR or the expression level of the second heterologous non-arenaviral polypeptide expressed under control of an arenavirus 3′ UTR is at least about 1%, 2%, 3%, 4%, 5%, 6%, 7%, 8%, 9%, 10%, 15%, 20%, 30%, 40%, 50%, 60%, 70%, 80%, 90%, 100%, 1.5-fold, 2-fold, 3-fold, 4-fold, 5-fold, 6-fold, 7-fold, 8-fold, 9-fold, 10-fold, 12-fold, 15-fold, 18-fold, 20-fold, 25-fold, or 30-fold higher than the expression level of the same heterologous non-arenaviral polypeptide expressed under control of the respective arenavirus 5′ UTR or higher than the expression level of the same second heterologous non-arenaviral polypeptide expressed under control of the respective arenavirus 5′ UTR.

136. A translation product of the arenavirus genomic or antigenomic segment of any one of claims 108-135.

137. An arenavirus particle comprising the arenavirus genomic or antigenomic segment of any one of claims 108-135.

138. The arenavirus particle of claim 137, wherein the genome of the arenavirus particle consists of an S segment and an L segment.

139. The arenavirus particle of claim 137, wherein the arenavirus particle is tri-segmented.

140. The arenavirus particle of claim 139, wherein the tri-segmented arenavirus particle comprises two S segments and an L segment.

141. The arenavirus particle of claim 140, wherein the genome of the arenavirus particle consists of
a) an S segment that encodes arenavirus GP signal peptide and a heterologous non-arenaviral polypeptide or arenavirus GP signal peptide alone under the control of an arenavirus 3′ UTR and a heterologous non-arenaviral signal peptide, arenavirus GP1 and arenavirus GP2 under the control of an arenavirus 5′ UTR;
b) an S segment that encodes NP under the control of an arenavirus 3′ UTR and another heterologous non-arenaviral polypeptide or no polypeptide under the control of an arenavirus 5′ UTR; and
c) an L segment that encodes L protein under the control of an arenavirus 3′ UTR and Z protein under the control of an arenavirus 5′ UTR; and
wherein the two heterologous non-arenaviral polypeptides are the same or different from each other.

142. The arenavirus particle of claim 140, wherein the genome of the arenavirus particle consists of
a) an S segment that encodes arenavirus GP signal peptide and a heterologous non-arenaviral polypeptide or arenavirus GP signal peptide alone under the control of an arenavirus 3′ UTR and another heterologous non-arenaviral polypeptide or no polypeptide under the control of an arenavirus 5′ UTR;
b) an S segment that encodes NP under the control of an arenavirus 3′ UTR and a heterologous non-arenaviral signal peptide, arenavirus GP1 and arenavirus GP2 under the control of an arenavirus 5′ UTR; and
c) an L segment that encodes L protein under the control of an arenavirus 3′ UTR and Z protein under the control of an arenavirus 5′ UTR; and
wherein the two heterologous non-arenaviral polypeptides are the same or different from each other.

143. The arenavirus particle of claim 139, wherein the tri-segmented arenavirus particle comprises an S segment and two L segments.

144. The arenavirus particle of any one of claims 137-143, wherein the arenavirus particle is derived from a Lassa virus.

145. The arenavirus particle of any one of claims 137-143, wherein the arenavirus particle is derived from a Lymphocytic choriomeningitis virus (LCMV).

146. The arenavirus particle of claim 145, wherein the LCMV is a MP strain, a WE strain, an Armstrong strain, or an Armstrong Clone 13 strain.

147. The arenavirus particle of any one of claims 137-143, wherein the arenavirus particle is derived from a Pichinde virus (PICV).

148. The arenavirus particle of any one of claims 137-143, wherein the arenavirus particle is derived from a Junin virus vaccine Candid #1, or a Junin virus vaccine XJ Clone 3 strain.

149. The arenavirus particle of any one of claims 137-143, wherein the arenavirus particle is derived from an Oliveros virus.

150. The arenavirus particle of any one of claims 137-143, wherein the arenavirus particle is derived from a Tamiami virus.

151. The arenavirus particle of any one of claims 137-150, wherein the genome of the arenavirus particle encodes the heterologous non-arenaviral polypeptide and/or the second heterologous non-arenaviral polypeptide; wherein the growth or infectivity of the arenavirus particle is not inferior to a second arenavirus particle; wherein the genome of the second arenavirus particle encodes the same heterologous non-arenaviral polypeptide and/or the same second heterologous non-arenaviral polypeptide; and wherein all arenaviral GP, NP, Z and L in the second arenavirus particle are each expressed as one ORF.

152. The arenavirus particle of any one of claims 137-151, wherein the arenavirus particle is infectious and replication competent.

153. The arenavirus particle of any one of claims 137-152, wherein the arenavirus particle is attenuated as compared to its parental wild-type virus.

154. The arenavirus particle of any one of claims 137-151, wherein the arenavirus particle is infectious but unable to produce further infectious progeny in non-complementing cells.

155. The arenavirus particle of any one of claims 137-153, wherein the titer of the arenavirus particle is at least about 1%, 2%, 3%, 4%, 5%, 6%, 7%, 8%, 9%, 10%, 15%, 20%, 30%, 40%, 50%, 60%, 70%, 80%, 90%, 100%, 1.5-fold, 2-fold, 3-fold, 4-fold, 5-fold, 6-fold, 7-fold, 8-fold, 9-fold, 10-fold, 12-fold, 15-fold, 18-fold, 20-fold, 25-fold, or 30-fold lower during a persistent infection in AGRAG mice than the titer of the respective wild-type parental arenavirus particle.

156. The arenavirus particle of any one of claims 137-155, wherein the arenavirus particle expresses a heterologous non-arenaviral polypeptide under control of an arenavirus 3′ UTR; wherein the arenavirus particle induces at least about 1%, 2%, 3%, 4%, 5%, 6%, 7%, 8%, 9%, 10%, 15%, 20%, 30%, 40%, 50%, 60%, 70%, 80%, 90%, 100%, 1.5-fold, 2-fold, 3-fold, 4-fold, 5-fold, 6-fold, 7-fold, 8-fold, 9-fold, 10-fold, 12-fold, 15-fold, 18-fold, 20-fold, 25-fold, or 30-fold higher immune responses against the heterologous non-arenaviral polypeptide in a subject after the arenavirus particle is administered to a subject than after another arenavirus particle expressing the same heterologous non-arenaviral polypeptide under control of an arenavirus 5′ UTR is administered to a subject or to a comparable subject.

157. A cDNA of the arenavirus genomic or antigenomic segment of any one of claims 108-135.

158. A method of producing an arenavirus genomic or antigenomic segment, wherein the method comprises transcribing the cDNA of claim 157.

159. A method of generating an arenavirus particle, wherein the method comprises:
a) transfecting into a host cell one or more cDNA sequences of claim 157 or one or more RNA sequences each transcribed in vitro from the cDNA sequence of claim 157;
b) transfecting into the host cell nucleotide sequences encoding arenavirus trans-acting factors;
c) maintaining the host cell under conditions suitable for virus formation; and
d) harvesting the arenavirus particle.

160. The method of claim 159, wherein the one or more cDNA sequences are transcribed using a bidirectional promoter.

161. The method of any one of claims 159-160, wherein the one or more cDNA sequences are transcribed under the control of a promoter selected from the group consisting of:
a) a RNA polymerase I promoter;
b) a RNA polymerase II promoter; and
c) a T7 promoter.

162. A DNA expression vector comprising a DNA sequence encoding the arenavirus genomic or antigenomic segment of any one of claims 108-135.

163. A method of rescuing an arenavirus particle using the arenavirus genomic or antigenomic segment of any one of claims 108-135 or a DNA sequence encoding the arenavirus genomic or antigenomic segment.

164. A host cell comprising the arenavirus genomic or antigenomic segment of any one of claims 108-135, the translation product of claim 136, the arenavirus particle of any one of claims 137-156, or the DNA expression vector of claim 162.

165. A vaccine comprising the arenavirus genomic or antigenomic segment of any one of claims 108-135, the translation product of claim 136, the arenavirus particle of any one of claims 137-156, or the DNA expression vector of claim 162, and a pharmaceutically acceptable carrier.

166. A pharmaceutical composition comprising the arenavirus genomic or antigenomic segment of any one of claims 108-135, the translation product of claim 136, the arenavirus particle of any one of claims 137-156, or the DNA expression vector of claim 162, and a pharmaceutically acceptable carrier.

167. The nucleotide sequence of any one of claims 1-27, wherein the expression of the heterologous non-arenaviral polypeptide is under control of an arenavirus 3′ UTR and the expression of the second heterologous non-arenaviral polypeptide is under control of an arenavirus 5′ UTR, wherein the proportion of cells expressing both the heterologous non-arenaviral polypeptide and the second heterologous non-arenaviral polypeptide, after an arenavirus particle containing a genome comprising the nucleotide sequence infects a population of cells, is at least about 1%, 2%, 3%, 4%, 5%, 6%, 7%, 8%, 9%, 10%, 15%, 20%, 30%, 40%, 50%, 60%, 70%, 80%, 90%, 100%, 1.5-fold, 2-fold, 3-fold, 4-fold, 5-fold, 6-fold, 7-fold, 8-fold, 9-fold, 10-fold, 12-fold, 15-fold, 18-fold, 20-fold, 25-fold, or 30-fold higher than the proportion of cells expressing both the same heterologous non-arenaviral polypeptide and the same second heterologous non-arenaviral polypeptide expressed under control of arenavirus 5′ UTRs, after an arenavirus particle containing a genome comprising a nucleotide sequence encoding the same heterologous non-arenaviral polypeptide and the same second heterologous non-arenaviral polypeptide expressed under control of arenavirus 5′ UTRs infects a comparable population of cells.

168. The arenavirus particle of any one of claims 60-74, wherein the arenavirus particle expresses two heterologous non-arenaviral polypeptides, wherein the expression of a first of the two heterologous non-arenaviral polypeptides is under control of an arenavirus 3′ UTR in a first S segment and the expression of a second of the two heterologous non-arenaviral polypeptides is under control of an arenavirus 5′ UTR in a second S segment, wherein the proportion of cells expressing both the two heterologous non-arenaviral polypeptides after the arenavirus particle infects a population of cells is at least about 1%, 2%, 3%, 4%, 5%, 6%, 7%, 8%, 9%, 10%, 15%, 20%, 30%, 40%, 50%, 60%, 70%, 80%, 90%, 100%, 1.5-fold, 2-fold, 3-fold, 4-fold, 5-fold, 6-fold, 7-fold, 8-fold, 9-fold, 10-fold, 12-fold, 15-fold, 18-fold, 20-fold, 25-fold, or 30-fold higher than the proportion of cells expressing both the same two heterologous non-arenaviral polypeptides after an arenavirus particle expressing the same two heterologous non-arenaviral polypeptides under control of arenavirus 5′ UTRs infects a comparable population of cells, and wherein the expression of a first of the same two heterologous non-arenaviral polypeptides is under control of an arenavirus 5′ UTR in a first S segment and the expression of a second of the same two heterologous non-arenaviral polypeptides is under control of an arenavirus 5′ UTR in a second S segment.

169. The arenavirus particle of any one of claims 30-36, 60-84, 137-143, or 168, wherein the arenavirus particle is derived from a Mobala virus.

170. The arenavirus particle of any one of claims 30-36, 60-84, 137-143, or 168, wherein the arenavirus particle is derived from a Mopeia virus.

171. The arenavirus particle of any one of claims 30-36, 60-84, 137-143, or 168, wherein the arenavirus particle is derived from a Ippy virus.

172. The arenavirus particle of any one of claims 30-36, 60-84, 137-143, or 168, wherein the arenavirus particle is derived from a Amapari virus.

173. The arenavirus particle of any one of claims 30-36, 60-84, 137-143, or 168, wherein the arenavirus particle is derived from a Flexal virus.

174. The arenavirus particle of any one of claims 30-36, 60-84, 137-143, or 168, wherein the arenavirus particle is derived from a Guanarito virus.

175. The arenavirus particle of any one of claims 30-36, 60-84, 137-143, or 168, wherein the arenavirus particle is derived from a Latino virus.

176. The arenavirus particle of any one of claims 30-36, 60-84, 137-143, or 168, wherein the arenavirus particle is derived from a Machupo virus.

177. The arenavirus particle of any one of claims 30-36, 60-84, 137-143, or 168, wherein the arenavirus particle is derived from a Parana virus.

178. The arenavirus particle of any one of claims 30-36, 60-84, 137-143, or 168, wherein the arenavirus particle is derived from a Pirital virus.

179. The arenavirus particle of any one of claims 30-36, 60-84, 137-143, or 168, wherein the arenavirus particle is derived from a Sabia virus.

180. The arenavirus particle of any one of claims 30-36, 60-84, 137-143, or 168, wherein the arenavirus particle is derived from a Tacaribe virus.

181. The arenavirus particle of any one of claims 30-36, 60-84, 137-143, or 168, wherein the arenavirus particle is derived from a Bear Canyon virus.

182. The arenavirus particle of any one of claims 30-36, 60-84, 137-143, or 168, wherein the arenavirus particle is derived from a Whitewater Arroyo virus.

183. The arenavirus particle of any one of claims 30-36, 60-84, 137-143, or 168, wherein the arenavirus particle is derived from an Allpahuayo virus.

184. The arenavirus particle of any one of claims 30-36, 60-84, 137-143, or 168, wherein the arenavirus particle is derived from an Alxa virus.

185. The arenavirus particle of any one of claims 30-36, 60-84, 137-143, or 168, wherein the arenavirus particle is derived from a Chapare virus.

186. The arenavirus particle of any one of claims 30-36, 60-84, 137-143, or 168, wherein the arenavirus particle is derived from a Lijiang virus.

187. The arenavirus particle of any one of claims 30-36, 60-84, 137-143, or 168, wherein the arenavirus particle is derived from a Cupixi virus.

188. The arenavirus particle of any one of claims 30-36, 60-84, 137-143, or 168, wherein the arenavirus particle is derived from a Gairo virus.

189. The arenavirus particle of any one of claims 30-36, 60-84, 137-143, or 168, wherein the arenavirus particle is derived from a Loei River virus.

190. The arenavirus particle of any one of claims 30-36, 60-84, 137-143, or 168, wherein the arenavirus particle is derived from a Lujo virus.

191. The arenavirus particle of any one of claims 30-36, 60-84, 137-143, or 168, wherein the arenavirus particle is derived from a Luna virus.

192. The arenavirus particle of any one of claims 30-36, 60-84, 137-143, or 168, wherein the arenavirus particle is derived from a Luli virus.

193. The arenavirus particle of any one of claims 30-36, 60-84, 137-143, or 168, wherein the arenavirus particle is derived from a Lunk virus.

194. The arenavirus particle of any one of claims 30-36, 60-84, 137-143, or 168, wherein the arenavirus particle is derived from a Mariental virus.

195. The arenavirus particle of any one of claims 30-36, 60-84, 137-143, or 168, wherein the arenavirus particle is derived from a Merino Walk virus.

196. The arenavirus particle of any one of claims 30-36, 60-84, 137-143, or 168, wherein the arenavirus particle is derived from a Morogoro virus.

197. The arenavirus particle of any one of claims 30-36, 60-84, 137-143, or 168, wherein the arenavirus particle is derived from a Okahandja virus.

198. The arenavirus particle of any one of claims 30-36, 60-84, 137-143, or 168, wherein the arenavirus particle is derived from an Aporé virus.

199. The arenavirus particle of any one of claims 30-36, 60-84, 137-143, or 168, wherein the arenavirus particle is derived from a Ryukyu virus.

200. The arenavirus particle of any one of claims 30-36, 60-84, 137-143, or 168, wherein the arenavirus particle is derived from a Solwezi virus.

201. The arenavirus particle of any one of claims 30-36, 60-84, 137-143, or 168, wherein the arenavirus particle is derived from a souris virus.

202. The arenavirus particle of any one of claims 30-36, 60-84, 137-143, or 168, wherein the arenavirus particle is derived from a Wenzhou virus.

203. The arenavirus particle of any one of claims 30-36, 60-84, 137-143, or 168, wherein the arenavirus particle is derived from a Big Brushy Tank virus.

204. The arenavirus particle of any one of claims 30-36, 60-84, 137-143, or 168, wherein the arenavirus particle is derived from a Catarina virus.

205. The arenavirus particle of any one of claims 30-36, 60-84, 137-143, or 168, wherein the arenavirus particle is derived from a Skinner Tank virus.

206. The arenavirus particle of any one of claims 30-36, 60-84, 137-143, or 168, wherein the arenavirus particle is derived from a Tonto Creek virus.

207. The arenavirus particle of any one of claims 30-36, 60-84, 137-143, or 168, wherein the arenavirus particle is derived from a Xapuri virus.

The application's sequence listing, which the Patent Office published only in electronic form, follows.

SEQUENCE LISTING (140 sequences)

SEQ ID NO: 1 - protein, 498 aa, lymphocytic choriomeningitis virus
  glycoprotein precursor in LCMV
MGQIVTMFEALPHIIDEVINIVIIVLIIITSIKAVYNFATCGILALVSFLFLAGRSCGMYGLNGPDIYKGVYQFKSVEFDMSHLNLTMPNACSANNSHHYISMGSSGLELTFTNDSILNHNFCNLTSAFNKKTFDHTLMSIVSSLHLSIRGNSNHKAVSCDFNNGITIQYNLSFSDPQSAISQCRTFRGRVLDMFRTAFGGKYMRSGWGWAGSDGKTTWCSQTSYQYLIIQNRTWENHCRYAGPFGMSRILFAQEKTKFLTRRLAGTFTWTLSDSSGVENPGGYCLTKWMILAAELKCFGNTAVAKCNVNHDEEFCDMLRLIDYNKAALSKFKQDVESALHVFKTTVNSLISDQLLMRNHLRDLMGVPYCNYSKFWYLEHAKTGETSVPKCWLVTNGSYLNETHFSDQIEQEADNMITEMLRKDYIKRQGSTPLALMDLLMFSTSAYLISIFLHLVKIPTHRHIKGGSCPKPHRLTNKGICSCGAFKVPGVKTIWKRR

SEQ ID NO: 2 - protein, 490 aa, Lassa virus
  glycoprotein precursor in Lassa virus
MGQIITFFQEVPHVIEEVMNIVLIALSLLAILKGVYNVATCGIIGLVTFLFLCGRSCSLIYKGSYELQTLELNMETLNMTMPLSCTKNSSHHYIRVGNETGLELTLTNTSIINHKFCNLSDAHKRNLYDHALMSILSTFHLSIPNFNQYEAMSCDFNGGKISVQYNLSHAYAVDAAEHCGTVANGVLQTFMRMAWGGSYIALDSGRGNWDCIMTSYQYLIIQNTTWEDHCQFSRPSPIGYLGLLSQRTRDIYISRRLLGTFTWTLSDSEGNETPGGYCLTRWMLIEAELKCFGNTAVAKCNEKHDEEFCDMLRLFDFNKQAIQRLKSEAQMSIQLINKAVNALINDQLIMKNHLRDMMGIPYCNYSKYWYLNHTSSGRTSLPKCWLVSNGSYLNETHFSDDIEQQADNMITEMLQKEYIDRQGKTPLGLVDLFVFSTSFYLISIFLHLIKIPTHRHIVGKPCPKPHRLNHMGICSCGLYKQPGVPTRWKR

SEQ ID NO: 3 - protein, 508 aa, Pichinde virus
  glycoprotein precursor in Pichinde virus
MGQVVTLIQSIPEVLQEVFNVALIIVSTLCIIKGFVNLMRCGLFQLITFLILAGRSCDGMMIDRRHNLTHVEFNLTRMFDNLPQSCSKNNTHHYYKGPSNTTWGIELTLTNTSIANETTGNFSNIRSLAYGNISNCDKTEEAGHTLKWLLNELHFNVLHVTRHVGARCKTVEGAGVLIQYNLTVGDRGGEVGRHLIASLAQIIGDPKIAWVGKCFNNCSGGSCRLTNCEGGTHYNFLIIQNTTWENHCTYTPMATIRMALQKTAYSSVSRKLLGFFTWDLSDSTGQHVPGGYCLEQWAIVWAGIKCFDNTVMAKCNKDHNEEFCDTMRLFDFNQNAIKTLQLNVENSLNLFKKTINGLISDSLVIRNSLKQLAKIPYCNYTKFWYINDTITGRHSLPQCWLVHNGSYLNETHFKNDWLWESQNLYNEMLIKEYEERQGKTPLALTDICFWSLVFYTITVFLHLVGIPTHRHIIGDGCPKPHRITRNSLCSCGYYKIPKKPYKWVRLGK

SEQ ID NO: 4 - protein, 485 aa, Junin virus
  glycoprotein precursor in Junin virus
MGQFISFMQEIPTFLQEALNIALVAVSLIAIIKGIVNLYKSGLFQFFVFLALAGRSCTEEAFKIGLHTEFQTVSFSMVGLFSNNPHDLPLLCTLNKSHLYIKGGNASFQISFDDIAVLLPQYDVIIQHPADMSWCSKSDDQIWLSQWFMNAVGHDWHLDPPFLCRNRAKTEGFIFQVNTSKTGVNGNYAKKFKTGMHHLYREYPDPCLNGKLCLMKAQPTSWPLQCPLDHVNTLHFLTRGKNIQLPRRSLKAFFSWSLTDSSGKDTPGGYCLEEWMLVAAKMKCFGNTAVAKCNLNHDSEFCDMLRLFDYNKNAIKTLNDETKKQVNLMGQTINALISDNLLMKNKIRELMSVPYCNYTKFWYVNHTLSGQHSLPRCWLIKNNSYLNISDFRNDWILESDFLISEMLSKEYSDRQGKTPLTLVDICIWSTVFFTASLFLHLVGIPSHRHIRGEACPLPHRLNSLGGCRCGKYPNLKKPTVWRRGH

SEQ ID NO: 5 - protein, 518 aa, Oliveros virus
  glycoprotein precursor in Oliveros virus
MGQVIGFFQSLPNIINEALNIALICVALIAILKGIVNIWKSGLIQLFIFLILAGRSCSHTFQIGRNHEFQSITLNFTQFLGYAPSSCSVNNTHHYFRGPGNVSWGIELTLTNNSVINASNSLKVFTNIHHNITNCVQNIDEQDHLMKWLIETMHLQIMKPGKRLPPILCEKDKGLLIEYNLTNIASREEKHSEYWSQLLYGLSKLLGSSKSLWFDYCQRADCMMQEHSSHLKCNYSECSGHTTFKYLILQNTTWENHCEFNHLNTIHLLMSSTGQSFITRRLQAFLTWTLSDATGNDLPGGYCLEQWAIVWAGIKCFGNTAVAKCNQNHDSEFCDMLRLFDYNRNAIKSLNDQSQSRLNLLTNTINSLISDNLLMKNKLAEIMNIPYCNYTKFWYINDTRTGRHTLPQCWLISNGSYLNETKFRTQWLSESNALYTEMLTEDYDKRQGSTPLSLVDLCFWSTLFYVTTLFAHLVGFPTHRHILDGPCPKPHRLTKKGICSCGHFGIPGKPVRWVKRSR

SEQ ID NO: 6 - protein, 485 aa, Tamiami virus
  glycoprotein precursor in Tamiami virus
MGQLISFFGEIPTILQEALNIALIAVSIIATIKGVVNVWKSGLIQLLMFVMLAGRSCSVQIGHHLELEHIILNSSSILPFTPTLCKLNKTYFLVRGPFQAHWGVDLAIGSTTVAVENATKTYTLKSKNFTGCFEGNPDPDSAALLVTWLFNSLHHDYKNDPSILCERVSGENSFRFQINISEPEYCEKILSRMANLFGSFENYCLNNRHIKKLIIIRNLTWSQQCHENHMSAMQLITSNIHTQVVRARRILSFFTWSLSDAVGNDMPGGYCLEKWMLIASQLKCFGNTAVAKCNLNHDSEFCDMLRLFDFNRKAIETLQNKTRSQLNIAINAINSLISDNLLMKNRVKELMDIPFCNYTKFWYVNHTKLNHHSLPRCWLVKNGSYLNESEFRNDWLLESDHLISEILSREYEERQGRTPLSLVDVCFWSTLFYTASIFLHLIRIPTHRHIVGEGCPKPHRLRADSTCACGLYKQKRRPLKWVRSN

SEQ ID NO: 7 - protein, 558 aa, lymphocytic choriomeningitis virus
  nucleoprotein in LCMV
MSLSKEVKSFQWTQALRRELQSFTSDVKAAVIKDATNLLNGLDFSEVSNVQRIMRKEKRDDKDLQRLRSLNQTVHSLVDLKSTSKKNVLKVGRLSAEELMSLAADLEKLKAKIMRSERPQASGVYMGNLTTQQLDQRSQILQIVGMRKPQQGASGVVRVWDVKDSSLLNNQFGTMPSLTMACMAKQSQTPLNDVVQALTDLGLLYTVKYPNLNDLERLKDKHPVLGVITEQQSSINISGYNFSLGAAVKAGAALLDGGNMLESILIKPSNSEDLLKAVLGAKRKLNMFVSDQVGDRNPYENILYKVCLSGEGWPYIACRTSIVGRAWENTTIDLTSEKPAVNSPRPAPGAAGPPQVGLSYSQTMLLKDLMGGIDPNAPTWIDIEGRFNDPVEIAIFQPQNGQFIHFYREPVDQKQFKQDSKYSHGMDLADLFNAQPGLTSSVIGALPQGMVLSCQGSDDIRKLLDSQNRKDIKLIDVEMTREASREYEDKVWDKYGWLCKMHTGIVRDKKKKEITPHCALMDCIIFESASKARLPDLKTVHNILPHDLIFRGPNVVTL

SEQ ID NO: 8 - protein, 569 aa, Lassa virus
  nucleoprotein in Lassa virus
MSNSKEVKSFLWTQSLRRELSGYCSNIKLQVVKDAQALLHGLDFSEVSNVQRLMRKQKRDDGDLKRLRDLNQAVNNLVELKSVQQKSILRVGTLTSDDLLTLAADLEKLKSKVTRTERPLSSGVYMGNLSSQQLDQRRALLSMIGMSGGNQNSQPKGDGVVRVWDVKNADLLNNQFGTMPSLTLACLTKQGQVDLNDAVQALTDLGLIYTAKYPNSSDLDRLSQSHPILNMIDTKKSSLNISGYNFSLGAAIKTGACMLDGGNMLETIKVTPQTMDGILKSILKVKRSLGMFISDTPGERNPYENILYKICLSGDGWPYIASRTAIIGRAWENTVVDLESDSKPQKIGSNGSNKSLQSAGFAPGLTYSQLMTLKDSMLQLDPNAKTWIDIEGRPEDPVEVALFQPISGCYIHFFREPTDLKQFKQDAKYSHGIDVTDLFAAQPGLTSAVIEALPRNMVLTCQGSDDIKKLLDSQGRRDIKLIDVSLNKIDSRKFENAVWDQYKDLCHMHTGVVVEKKKKGGKEEITPHCALLDCIMFDAAVSGGLNATVLRAVLPRDMVFRTSSPKVVL

SEQ ID NO: 9 - protein, 561 aa, Pichinde virus
  nucleoprotein in Pichinde virus
MSDNIPSFRWVQSLRRGLSNWTHPVKADVLSDTRALLSALDFHKVAQVQRMMRKDKRTDSDLTKLRDMNKEVDALMNMRSIQRDNVLKVGGLAKEELMELASDLDKLRKKVTRTESLSQPGVYGGNLTNTQLEQRAEILRSMGFANARPTGNRDGVVKIWDIKDNTLLINQFGSMPALTIACMTEQGGEQLNDVVQALSALGLLYTVKFPNMTDLEKLTQQHSALKIISNEPSAINISGYNLSLSAAVKAAACMIDGGNMLETIQVKPSMFSTLIKSLLQIKNREGMFVSTTPGQRNPYENLLYKICLSGDGWPYIGSRSQVQGRAWDNTTVDLDSKPSAIQPPVRNGGSPDLKQIPKEKEDTVVSSIQMLDSKATTWIDIEGTPNDPVEMAIYQPDTGNYIHCYRFPHDEKSFKEQSKYSHGLLLKDLADAQPGLISSIIRHLPQNMVFTAQGSDDIISLFEMHGRRDLKVLDVKLSAEQARTFEDEIWERYNLLCTKHKGLVIKKKKKGAAQTTANPHCALLDTIMFDATVTGWVRDQKPMRCLPIDTLYRNNTDLINL

SEQ ID NO: 10 - protein, 564 aa, Junin virus
  nucleoprotein in Junin virus
MAHSKEVPSFRWTQSLRRGLSQFTQTVKSDVLKDAKLIADSIDFNQVAQVQRALRKTKKGEEDLNKLRDLNKEVDRLMSMRSVQRNTVFKVGDLGRDELMELASDLEKLKNKIRRAETGSQGVYMGNLSQSQLAKRSEILRTLGFQQQGTGGNGVVRIWDVKDPSKLNNQFGSVPALTIACMTVQGGETMNSVIQALTSLGLLYTVKYPNLSDLDRLTQEHDCLQIVTKDESSINISGYNFSLSAAVKAGASILDGGNMLETIRVTPENFSSLIKSTIQVKRREGMFIDEKPGNRNPYENLLYKLCLSGDGWPYIGSRSQITGRSWDNTSIDLTRKPVAGPRQPEKNGQNLRLANLTEIQEAVIREAVGKLDPTNTLWLDIEGPATDPVEMALFQPAGKQYIHCFRKPHDEKGFKNGSRHSHGILMKDIEDAMPGVLSYVIGLLPPDMVVTTQGSDDIRKLFDLHGRRDLKLVDVKLTSEQARQFDQQVWEKYGHLCKYHNGVVVNKKKREKDTPFKLASSEPHCALLDCIMFQSVLDGKLYEEEPTPLLPPSLLFLPKAAYAL

SEQ ID NO: 11 - protein, 558 aa, Oliveros virus
  nucleoprotein in Oliveros virus
MSGASDIPSFRWTQSLRRGLSHYTTQTKGDVLRDAKSLVDGLDFSQVSQVQRVMRKERRSDDDLLKLRDLNKAVDGLMMMRNKQSNVSLKVGGLSKDELMELATDLEKLKRKINTNERSTPGVYQGNLTTAQLDRRSAILRSLGFQSRQGQNNGVVRIWDIKDQKQLINQFGSMPALTIACMSVQGAEQMNDVVQGLTTLGLLYTVKYPNLDDLEKLSAEHTCLQFITREESANNISGYNLSLAAAVKAGACLVDGGNMLETIYVKPDVFADIIKSLLRVKHQERMFVSEKPGMRNPYENILYKICLSGEGWPYIGSRSQITGRAWDNTTIDFSKDVMYGPPPPVKNGGNIRLNPLTDTQEAVIKEAISKLNPDETIWVDIEGPPTDPVELALYQPTTGYYIHCFRLPHDEKGFKNGSKYSHGILLRDIENARSGLLSRILIKLPSKLVLTCQGSDDIKKLMELNGRPDISTIDLSFPTDQARFYESVVWEKFGSLCTKHNGVVLSRKKKGGNSGEPHCALLDCLMFQAAFEGNVPSIEPKPLLPSALVFKSESVVAM

SEQ ID NO: 12 - protein, 565 aa, Tamiami virus
  nucleoprotein in Tamiami virus
MSDQSVPSFRWVQSLRRGLSAWTTPVKADVLNDTRALLSGLDFSKVASVQRMMRREKRDDNDLTNLRDLNKEVDSLMTMRSSQKNMFLKVGSLSKDELMELSSDLNKLKEKVQRSERISGSSGVYQGNLTTTQLTRRSEILQLVGIQRPGLNRRGGVVKIWDIKEPEHSLINQFGSTPAVTISCMAEQGGETLNDVVARPNRSVGYFTQQSFLIWVTWRALSSKHSCLKVITQEESQINISGFNLSLSAAVKAGACLVDGGNMLETIKVEESTFTTIIKTLLEIKSKERMFVDITPGQRNPYENLLYKLCLSGEGWPYIASRSQIKGRAWDNTVIEFDVSPRKPPVPIRNGGSPVLTTLKPEVEEQIKRSIESLSVHDTTWIDIEGPPFDPVEMAIYQPDSLKYIHCYRKPNDVKSFKDQSKYCHGILLKDIEYCSSLALYQPSLRHLPKSMVFTAQGSEDIRRLFDMHGRQDLKIVDVKFTAEQSRVFEELTWKRFEHLCDKHKGIVIKSKKKGTTPASTNAHCALMDCIMFSGVLLGAIPNDKPRRLLPLDILFREPDTTVVL

SEQ ID NO: 13 - protein, 90 aa, lymphocytic choriomeningitis virus
  Z protein in LCMV
MGQGKSREEKGTNSTNRAEILPDTTYLGPLSCKSCWQKFDSLVRCHDHYLCRHCLNLLLSVSDRCPLCKYPLPTRLKISTAPSSPPPYEE

SEQ ID NO: 14 - protein, 99 aa, Lassa virus
  Z protein in Lassa virus
MGNKQAKAPESKDSPRASLIPDATHLGPQFCKSCWFENKGLVECNNHYLCLNCLTLLLSVSNRCPICKMPLPTKLRPSAAPTAPPTGAADSIRPPPYSP

SEQ ID NO: 15 - protein, 95 aa, Pichinde virus
  Z protein in Pichinde virus
MGLRYSKEVRKRHGDEDVVGRVPMTLNLPQGLYGRFNCKSCWFVNKGLIRCKDHYLCLGCLTKMHSRGNLCEICGHSLPTKMEFLESPSAPPYEP

SEQ ID NO: 16 - protein, 94 aa, Junin virus
  Z protein in Junin virus
MGNCNGASKSNQPDSSRATQPAAEFRRVAHSSLYGRYNCKCCWFADTNLITCNDHYLCLRCHQGMLRNSDLCNICWKPLPTTITVPVEPTAPPP

SEQ ID NO: 17 - protein, 99 aa, Oliveros virus
  Z protein in Oliveros virus
MGSKSSKSSGFENVPSLGLSHTNQPRVSLIREARPSLYGRYNCKCCWFQNKNLVECSDHYLCLKCISSMLRRGQNCEICGKPIPTHIAVTTAPTAPPEP

SEQ ID NO: 18 - protein, 95 aa, Tamiami virus
  Z protein in Tamiami virus
MGLRYSKEVRDRHGDKDPEGRIPITQTMPQTLYGRYNCKSCWFANKGLIKCSNHYICLRCLTSMLNRTDYCEICGEVLPKRLTFETTPTAPPYTP

SEQ ID NO: 19 - protein, 2210 aa, lymphocytic choriomeningitis virus
  L protein in LCMV
MDEIISELRELCLNYIEQDERLSRQKLNFLGQREPRMVLIEGLKLLSRCIEIDSADKSGCTHNHDDKSVETILVESGIVCPGLPLIIPDGYKLIDNSLILLECFVRSTPASFEKKFIEDTNKLACIREDLAVAGVTLVPIVDGRCDYDNSFMPEWANFKFRDLLFKLLEYSNQNEKVFEESEYFRLCESLKTTIDKRSGMDSMKILKDARSTHNDEIMRMCHEGINPNMSCDDVVFGINSLFSRFRRDLESGKLKRNFQKVNPEGLIKEFSELYENLADSDDILTLSREAVESCPLMRFITAETHGHERGSETSTEYERLLSMLNKVKSLKLLNTRRRQLLNLDVLCLSSLIKQSKFKGLKNDKHWVGCCYSSVNDRLVSFHSTKEEFIRLLRNRKKSKVFRKVSFEELFRASISEFIAKIQKCLLVVGLSFEHYGLSEHLEQECHIPFTEFENFMKIGAHPIMYYTKFEDYNFQPSTEQLKNIQSLRRLSSVCLALTNSMKTSSVARLRQNQIGSVRYQVVECKEVFCQVIKLDSEEYHLLYQKTGESSRCYSIQGPDGHLISFYADPKRFFLPIFSDEVLYNMIDIMISWIRSCPDLKDCLTDIEVALRTLLLLMLTNPTKRNQKQVQSVRYLVMAIVSDFSSTSLMDKLREDLITPAEKVVYKLLRFLIKTIFGTGEKVLLSAKFKFMLNVSYLCHLITKETPDRLTDQIKCFEKFFEPKSQFGFFVNPKEAITPEEECVFYEQMKRFTSKEIDCQHTTPGVNLEAFSLMVSSFNNGTLIFKGEKKLNSLDPMTNSGCATALDLASNKSVVVNKHLNGERLLEYDFNKLLVSAVSQITESFVRKQKYKLSHSDYEYKVSKLVSRLVIGSKGEETGRSEDNLAEICFDGEEETSFFKSLEEKVNTTIARYRRGRRANDKGDGEKLTNTKGLHHLQLILTGKMAHLRKVILSEISFHLVEDFDPSCLTNDDMKFICEAVEGSTELSPLYFTSVIKDQCGLDEMAKNLCRKFFSENDWFSCMKMILLQMNANAYSGKYRHMQRQGLNFKFDWDKLEEDVRISERESNSESLSKALSLTQCMSAALKNLCFYSEESPTSYTSVGPDSGRLKFALSYKEQVGGNRELYIGDLRTKMFTRLIEDYFESFSSFFSGSCLNNDKEFENAILSMTINVREGFLNYSMDHSKWGPMMCPFLFLMFLQNLKLGDDQYVRSGKDHVSTLLTWHMHKLVEVPFPVVNAMMKSYVKSKLKLLRGSETTVTERIFRQYFEMGIVPSHISSLIDMGQGILHNASDFYGLLSERFINYCIGVIFGERPEAYTSSDDQITLFDRRLSDLVVSDPEEVLVLLEFQSHLSGLLNKFISPKSVAGRFAAEFKSRFYVWGEEVPLLTKFVSAALHNVKCKEPHQLCETIDTIADQAIANGVPVSLVNSIQRRTLDLLKYANFPLDPFLLNTNTDVKDWLDGSRGYRIQRLIEELCPNETKVVRKLVRKLHHKLKNGEFNEEFFLDLFNRDKKEAILQLGDLLGLEEDLNQLADVNWLNLNEMFPLRMVLRQKVVYPSVMTFQEERIPSLIKTLQNKLCSKFTRGAQKLLSEAINKSAFQSCISSGFIGLCKTLGSRCVRNKNRENLYIKKLLEDLTTDDHVTRVCNRDGITLYICDKQSHPEAHRDHICLLRPLLWDYICISLSNSFELGVWVLAEPTKGKNNSENLTLKHLNPCDYVARKPESSRLLEDKVNLNQVIQSVRRLYPKIFEDQLLPFMSDMSSKNMRWSPRIKFLDLCVLIDINSESLSLISHVVKWKRDEHYTVLFSDLANSHQRSDSSLVDEFVVSTRDVCKNFLKQVYFESFVREFVATTRTLGNFSWFPHKEMMPSEDGAEALGPFQSFVSKVVNKNVERPMFRNDLQFGFGWFSYRMGDVVCNAAMLIRQGLTNPKAFKSLKDLWDYMLNYTKGVLEFSISVDFTHNQNNTDCLRKFSLIFLVRCQLQNPGVAELLSCSHLFKGEIDRRMLDECLHLLRTDSVFKVNDGVFDIRSEEFEDYMEDPLILGDSLELELLGSKRILDGIRSIDFERVGPEWEPVPLTVKMGALFEGRNLVQNIIVKLETKDMKVFLAGLEGYEKISDVLGNLFLHRFRTGEHLLGSEISVILQELCIDRSILLIPLSLLPDWFAFKDCRLCFSKSRSTLMYETVGGRFRLKGRSCDDWLGGSVAEDID

SEQ ID NO: 20 - protein, 2220 aa, Lassa virus
  L protein in Lassa virus
MEEDIACVKDLVSKYLVDNERLSRQKLAFLVQTEPRMLLMEGLKLLSLCIEVDSCNANGCEHNSEDKSVERILHDHGILTPSLCFVVPDGYKLTGNVLILLECFVRSSPANFEQKYIEDFKKLEQLKEDLKSVDINLIPLIDGRTSFYNEQIPDWVNDKLRDTLFSLLKYAQESNSLFEESEYSRLCESLSMTSGRLSGVESLNVLMDNRSNHYEEVIASCHQGINNKLTAHEVKLQIEEEYQVFRNRLRKGEIEGQFLKVDKSQLLNELNNLYADKVVAEDNIEHLIYQFKRASPILRFLYANVDEGNEKRENQTIGECQVQCWRSFLNKVKSLRILNTRRKLLLIFDALILLASKHDLMKQKCLKGWLGSCFLSVNDRLVSLESTKRDLEKWVERRQQAERSRITQSSQCLSKNQILNSIFQKTILKATTALKDVGISVDHYKIDMEVICLNSYDLIMDFDVSGVVPTISYQRTEEETFPYVMGDVELLGTTDLERLSSLSLALVNSMKTSSTVKLRQNEFGPARYQVVRCKEAYCQEFSLGNTELQLIYQKTGECSKCYAINDNKVGEVCSFYADPKRYFPAIFSAEVLQTTISTMISWIEDCNELEGQLNNIRSLTKMILVLILAHPSKRSQKLLQNLRYFVMAYVSDYHHKDLIDKIREELITDVEFLLYRLIRTLMNLVLSEDVKSMMTNRFKFILNVSYMCHFITKETPDRLTDQIKCFEKFLEPKVRFGHVSTNPADTATEEELDDMVYNAKKFLSKDGCTSIEGPDYKRPGVSKKYLSLLTSSFNNGSLFKEREVKREIKDPLITSGCATALDLASNKSVVVNKYTDGSRILNYDFNKLTALAVSQLTEVFSRKGKYLLNKQDYEYKVQQAMSNLVLGSGQLKSDADGADLDEILLDGGASDYFDQLKETVEKIVDQYREPVKLGSGPNGDGQPSINDLDEIVSNKFYIRLIKGELSNHMVEDFDHDILPGKFYEEFCNAVYENSRLKQKYFYCGHMSQCPIGELTKAVSTRTYFNHEYFQCFKSILLIMNANTLMGRYTHYKSRNLNFKFDMGKLSDDVRISERESNSEALSKALSLTNCTTAMLKNLCFYSQESPQSYDSVGPDTGRLKFSLSYKEQVGGNRELYIGDLRTKMFTRLIEDYFEAISLQLSGSCLNNEKEFENAILSMKLNVSLAHVSYSMDHSKWGPMMCPFLFLTVLQNLIFLSKDLQADIKGRDYLSTLLMWHMHKMVEIPFNVVTAMMKSFIKAQLGLRKKTKQSITEDFFYSNFQVGVVPSHISSILDMGQGILHNTSDFYALISERFINYAISCICGGTIDAYTSSDDQISLFDQSLTELLQRDPEEFRTLIEFHYYMSDQLNKFVSPKSVIGRFVAEFKSRFFVWGDEVPLLTKFVAAALHNIKCKEPHQLAETIDTIIDQSVANGVPVHLCNLIQKRTLNLLQYARYPIDPFLLNCETDVRDWVDGNRSYRIMRQIEGLIPNACSKIRSMLRKLYNRLKTGQLHEEFTTNYLSSEHLSSLRNLCELLDVEPPSESDLEYSWLNLAAHHPLRMVLRQKIIYSGAVNLDDEKIPTIVKTIQNKLSSTFTRGAQKLLSEAINKSAFQSSIASGFVGLCRTLGSKCVRGPNKENLYIKSIQSLISDVKGIKLLTNSNGIQYWQVPLELRNGSGSESVVSYFRPLLWDYMCISLSTAIELGAWVLGEPKTVKVLDFFKHNPCDYFPLKPTASKLLEDRVGLNHIIHSLRRLYPSVFEKHILPFMSDLASTKMKWSPRIKFLDLCVALDVNCEALSLVSHIVKWKREEHYIVLSSELRLSHSRTHEPMVEERVVSTSDAVDNFMRQIYFESYVRPFVATTRTLGSFTWFPHKTSVPEGEGLHRMGPFSSFVEKVIHKGVERPMFKHDLMMGYAWIDFDIEPARFNQNQLIASGLVDPKFDSLEDFFDAVASLPPGSAKLSQTVRFRVKSQDASFKESFAIHLEYTGSMNQQAKYLVHDVTVMYSGAVSPCVLSDCWRLVLSGPTFKGKSAWYVDTEIINEFLIDTNQLGHVTPVEIVVDMERLQFTEYDFVLVGPCTEPTPLVVHRGGLWECGKKLASFTPVIQDQDLEIFVREVGDTSSDLLIGALSDMMIDRLGLRMQWSGVDIVSTLRAAAPSCEGILSAVLEAVDNWVEFKGYALCYSKSRGKVMVQSSGGKLRLKGRTCEELTRKDECIEDIE

SEQ ID NO: 21 - protein, 2194 aa, Pichinde virus
  L protein in Pichinde virus
MEEYVFELKDIVRKWVPEWEELSEQKNNVLAQVKDRAITIEGLKLLSMLVEVDSCKKHSCKHNTKMTVNAILRELRVTCPTLPDVTPDGYCMVGDVLILLEVFVRTSQEAFEKKYNQDFLKLLQLSSDLKRQNITLVPVIDGRSSYYVEFVPDWVVERLRWLLLKLMDGLRTSGEEVEELEYERLISSLSSLENQSLGLESLLAVKERGLPYKVRLEKALMSGINNKLTTDQCRTKIMEIFQQFKMLQLAGQLDRKLQATDREDMISRLQNHEFIQCSVKDVPKSEIRLCEFCSVHILGIIGQLRQSEVKHSSTESREYFRVLSICNKIKSQKVFNTRRNTMLVLDLIMYNILCDLDKSSPGAVFREVLLMQGLPSVNDRLINVDFLMEQITKKFIKNPNWLEKAKKRLSSVCGELPLDDILPLLREPDVEYYFNLKTSVLDEWGAKPCLQYKTKSQCMCGGRPGRGQPDYTIMGESEFEELLKTLSSLSLSLINSMKTAAVPKMKVNNADEFYGKVYCDEVFFQRFGEGGSLTLLYQKTGERSRCYAVAYRSKSGGLYETKASFYCDPKRFFLPIFSADVIQRTCVEMLSWLDFMSQPLLDSVSDLLRRLILCILCTPSKRIQVYLQGFRYYIMAFVNEVHFKELFEKLKVVMLTPSEWQTAMLIDDLILLVLSNSREEDMAKIFKFVLNVSYLCHFITKETPDRLTDQIKCFEKFLEPKLKFDSVLVNPSNSMELPTEEEEKMVHDIERLLGKKLESKCEGRPGLNKDVLSVCLSLFNSSSLEVKPLLPCDPMTPSFTSTALDMSSNKSVVVPKLNEVGEVITEYDYSSIVSAVVVEMIEHFKTKGKYKLDPKEVNFKILKRLSSLIQIKKESIEPDGVEELLSEDQGDCLKEIETRVAKVLSKVDTNVKTNLKTSCPLERLWPKSTMVVIKRETSLHDVKDFDYSLFSAEVYEDLVNLIYEDVTARSVYFADRLMNPCPLEFLIKNLTLKAYKEADYFECFKYILIASDYDNRVGRYDHKSRSRLGFTDAALQIRETSRISSRESNSESIAKRLDQSFFTNSSLRNLCFYSDESPTERSGVSTNVGRLKFGLSYKEQVGGNRELYVGDLNTKLTTRLIEDYSESLMQNMRYTCLNNEKEFERALLDMKSVVRQSGLAVSMDHSKWGPHMSPVIFAALLKGLEFKLKDGSEVPNAAVINILLWHIHKMVEVPFNVVEAYMKGFLKRGLGMMDKGGCTIAEEFMFGYFEKGKVPSHISSVLDMGQGILHNTSDLYGLITEQFINYALELCYGARFISYTSSDDEIMLSLNEGFKFKDRDELNVELVLDCMEFHYFLSDKLNKFVSPKTVVGTFASEFKSRFFIWSQEVPLLTKFVAAALHNIKAKAPNQQADTIDTILDQCVANGVSIEVVGAIAKRTNSMIIYSGFPNDPFLCLEEMDVLDWVNGSRGYRLQRSIETLFPDDLLLSIIRKACRKIFYKIQSGALEESYIVTTLQQSPDDCLKQLLETCDVETEAIEDALNIRWLNLRVHGDLRLVLRTKLMSTTRTVQREEIPSLVKSVQSKLSKNYVRGAKKILADAINKSAFQSSIASGFIGVCKSMGSKCVRDGKGGFKYIRDITSKIILHRDCHFCNQRKGVYCKAALGEVSEYSRPLIWDYFALVLTNACELGNWVFQKAEVPKIVTHLNNPNHFWPIKPSTHSELEDKVGINHILYSIRRNFPTLFDEHISPFLSDLNMLRLSWVQRIKFLDLCVAIDITSECLGIVSHIIKHRREELYIVKQNELAMSHSRESHPLERGFNLEPEEVCTNFLIQILFESMLVPVIMSTSQFKKYFWFGELELLPNNAQHDLKQLTQFICDCKKNNTSRTMNLDDLDVGFVSSKLILSCVNLNISVFINELDWVNRDNYENIEQLILASPSEVIPIELNLTFSHKRVSHKFRYERSTNYILKLRFLIERESLLDSLDSDGYLLLNPHSVEYYVSQSSGNHISLDGVSLLVLNPLINGKDVLDFNDLLEGQDIHFKSRSTVFQKVRIDLKNRFKDLKNKFSYKLIGPDVGMQPLILEGGLIKEGNRVVSRLEVNLDSKVVIIALEALEPEKRPRFIANLFQYLSSAQSHNKGISMNEQDLRLMIENFPEVFEHMLHDAKDWLNCGHFSIIRSKTLGSVMIADETGPFKIKGIRCRKLFEDNESVEIE

SEQ ID NO: 22 - protein, 2210 aa, Junin virus
  L protein in Junin virus
MEESVNEIKSLIRKHFPERQELAYQRDIFLSQHHPSSLLLEGFKLLSSLVELESCEAHACQINSDQKFVDVILSDYGILCPTLPKVIPDGFKLTGKTLILLETFVRVNPDEFERKWKSDMSKLLNLKSDLLRAGITLVPVVDGRSSYSNRFLADWVVERVRWLLIDILKKSKFMQEINIEEQEYQRLIHSLSNTKNQSLGLENIECLKKNSLGYDERLNESLFVGVRGDIRESVIREELIKLRFWFKKEIFDKQLGKFKFSQKSKLINDLILLGSHKDSDVPSCPFCANKLMDVVYSIALHPIDEVNMESQSDENSISIDAVERCYLQALSVCNKVKGLKVFNTRRNTLLFLDLVLLNLLCDLFKTHDDAIVRLRNAGIVVGQMLMLVNDRLLDILEAIKLIRKKLMTSPKWVQACSRTLKNSHQDLWSQLEKLIKHPDMDSLMILAQALVSDRPVMRYTINKEFEKICRHQPFSSLVEGEQKKLFRILSSISLALVNSMKTSFSSRLLINEREYSRYFGNVRLRECYVQRFHLTKNTFGLLFYQKTGEKSRCYSIYLSINGVLEEQGSFYCDPKRFFLPIFSEDVLIEMCEEMTSWLDFSHELMTMTRPILRLLVLAVLCSPSKRNQTFLQGLRYFLMAYANQIHHVDLMSKLRVDCMSGSEVLIQRMAVELFQTILGEGEDADLYFARRFKYLLNVSYLCHLVTKETPDRLTDQIKCFEKFIEPKVKFDCVVVNPPLSGSLTLEQEDTMIRGLDRFFSKEAKTSSDTQIPGVCKEILSFCISLFNRGRLKVTGELKSNPYRPNITSTALDLSSNKSVVIPKLDELGNILSVYDKEKLVSTCVSTMAERFKTKGRYNLDPDSMDYLILKNLTGLVSTGSRTRTNQEELSVMYESLTEDQVRAFEGIRNDVQMTLAKMANSEGTKVEITKLKSKNPSVDERESLESLWAPFGVLREIKAEVSMHEVKDFDPDVLRSDVYKELCDAVYLSPFKLTYFLEAPQDICPLGLLLKNLTTIAYQEDEFFECFKYLLIQGHYDQKLGSYEHRSRSRLGFSSEVLRLKDEVRLSTRESNSEAIADKLDKSYFTNAALRNLCFYSDDSPTEFTSISSNTGNLKFGLSYKEQVGSNRELYVGDLNTKLMTRLVEDFSEAVGSSMKYTCLNSEKEFERAICDMKMAVNNGDLSCSYDHSKWGPTMSPALFLSFLYTLELKNPRDRTKVNLEPVMNILKWHLHKVVEVPINVAEAYCVGKLKRSLGLMGCDCTSVGEEFFHQYLQSRDQVPSHIMSVLDMGQGILHNTSDLYGLITEQFLCYALDLLYDVIPVTYTSSDDQVSLIKIPCLSDEKFQDRTELLEMVCFHEFLSSKLNKFISPKSVIGTFVAEFKSRFFVMGEETPLLTKFVSAALHNVKCKTPTQLSETIDTICDQCIANGVSTHIVSKISIRVNQLIRYSGYRETPFGAIEEQDVKDWVDGSRGYRLQRKIEAIFSDDKETMFIRNCARKVFNDIKRGKIFEENLINLISRGGDEALSGFLQYAGCSEDEIRQTLDYRWVNLASFGDLRLVLRTKLMTSRRVLEKEEMPTLIRTIQSRLSRNFTKGVKKILAESINKSAFQSSVASGFIGFCKSMGSKCVRDGKGGFLYIKDIFTRIMPCLCGICERKPKVIYCQKSLKEVNQFSKPILWDYFSLVLTNACELGEWVFSAIKSPQAPLVLCNKNFFWAVKPKAVRQIEDQLGMNHVLHSIRRNYPKLFEEHLAPFMNDLQVNRSLDSGRLKFLDVCVALDMMNENLGIISHLLKVRDNNVYIVKQSDCASAHVRQSEYTNWEVGISPQQVCRNFMVQVVLSSMINPLVMSTSCLKSFFWFNEVLDLEDDSQVDLAELTDFTLSVRNNKVSRAMFVEDIAMGYVVSSFDNIKVFLEGVSVDNISLLPQEDMMDLHTVLRNVACQEAVKLKLIIQVEHTRVSTKFKLRRKMVYSYTIVSSLGVDDVGTPELELNVDAMSQCVSGSEGSHSLLDGALVIASLPLFTGHESFDLAGLFIDAGYAATNDDNILSHVKFNFGDFYSELSNKYAYDLIGPDNPGEPLVLKEGIFYRGNERLSTYRVELSGDVIVKAIGALEDIDSVETLLSQLWPYLKTTSQTILFQQEDFVLVYDLHKEQLIRSLDKFGDWLEFSNFKVAFSRSLNDLLISDPQGQFRLKGVTCRPLKHKVEIKDID

SEQ ID NO: 23 - protein, 2234 aa, Oliveros virus
  L protein in Oliveros virus
MDESVSSLFDLLRKHFPAKEEISRQITVVTSQTEMRMILTEGFKLLSLLIELDSCEVNNCSHNKEDLTVEAILSKDNILTIALPRIVPDGYSLYGNVLILLETFVRVNPSSFEQKYNQDMNKLLSLKNDLQLCGITLVPLVDGRTNYYNKFVDDWVIERFRWLLTQIMKVAKESGESIEELEYQRLVTSLSKLENQSLGFENIIKMPQTGIDYRDKLKARMFANLSNKMKESEINQSLLSLKLAFDEAYNDESHLKKFQKTNKEDLIFKLGQQINLSDEKLSCMSCSSKLFSIVSSITQNRDKLDSHVMSVSNAKLWHHESGIANVNEYLRILSVCNKIKSAKILNTRRNTLLFLDMIVLNFIDDCWKNDPTILFQFKKSGLLVGQLAYFVNDRFFDLLLLKELLSKKLKSSPDWIHRCLCNIRKQEFFDISGVEFWIRQPDYESVEELCCALEPVKPKLQYCRDEDNHENHKLDLADKDNYFTCLSVLSSVCLGLVNSMKTSFTSKMVINEKSPNNFYGEVELKECYCQRFYVSDEITGLLFYQKTGEKSRCYSIGVTMHGSYKYIGSFYCDPKRFFLPIFSQVVLFQMTEEMMSWLPEEPSYKEPVVANLRKLILMLLCNPSKRNQNFLQGMRYFIMAYVNQFHSVELMSKLEVPCKSVSEECVQKLTYNLLVDVLTKGDVNEHMTRKFKFCLNVSYLCHLITKETPDRLTDQIKCFEKFLEPKLKFKSVIINPNLTGDLTEEQEEQLLNSIEKLLGKGLQDINDSSEPGISRELLSMCISAFNRDLLRVNGKLKNDPYKPNFTSTALDLSSNKSVVIPKLDELGNPISKYDYELLVSSCIASMAESFKTKGKYKLDPTSQEFLILKNLYSLMSKSKRDDHMKDSEDSKQNLSSDLENLSEEQVLILEQVKRDVNLALSKMRETKLKEKTEARQSSSGSSLKNQQKRQAELQERLSELWSEFMCMKIITVEVSLHEIKDFDPDLIDHTTLKSMLDKLYNSDLASEFFLEEILNPCPLEFLVKNMTTSSYLEGDLFECFKYTLISAGFDQKLGTYEHKNKTRLGFKYEALKVREEGRMSLRESNSEAIARRLDRSVFSNSALRNLCFYSDESPISYSHVSSDTGKLKFGLSYKEQVGSNRELYVGDLNTKLMTRLIEDFSESVVSNMNYSCLNSEKEFERSVMEMKMSVNLGEMNFSLDHSKWGPYMSPVIFAAFLQGLKLEQGSMCTPVSVEPIITLLSWHIHKVVEVPYNVIHAYMTGMIKRQLGLMSPGESSKTEAFIHRLLVDEREPLSHVMSVLDMGQGILHNTSDLYGLVTEQFINYAMRILYDVSMTSFTSSDDQITMVKLNEDLKDMDNPEVISNWERMINFHTFISSKFNKFVSPKTVIGTFAAEFKSRFFVWGEEVPLLTKFVSAALHNIKCKTPIQLSETIDTISDQCVANGVSVEIVSCISNRTNKLVRYSGFPDNPFLSVENMDVKDWVDGNRGYRLQRNIESHLEVDGCTRFVRQAARKVFRNIKSGKIMEQTLVNLVQEDGDKAFQGFMKSVDVSDDDIKLLQNFRWINLSTHGDMRLVLRTKLMSSRRIIEQEEIPGLIKSIQSKLSKNFVRGAKRILADSINKSAFQSSIASGFIGFCKSMGSKCVRLGGGGFGYIKDIKNKVKHDCLCDICFRWRGCVYCPSSCADVFEFSRPLMWDYFTLVLTNACELGEWVFEDVEIPKDLYFLRNPNLFWLVKPRVTCQLEERLGLSHILQSIRKNYPTLFETHLSPFMSDFMVGKTLGSLTVKFLDLCVALDLANENLGITKHFLKERRHEIYVVKQDESSQSHIRNVKGIESSVELNSMQVCNNFLTQLLMSSFIQPLVLTSSVFKKFNWFAEVLCLKTEEEVCLKQLTDFVLQVKKFNVDRAMHIEDLSAGYISSTINVTSFSLSVPTFLECVDSDFINKEGNEPGDFKDLLSSEFTKDTLTLDFCIQVSHIKRSVKFNVKRTLVYTLAVRTQIEKKIILEAIGTDDQISLIVSELDLFCSGHTGNHFVLDAAPLIYSEPLIAGSLKFDLLSMLRDQELSLTSSEKMPTFNFDFSSQKHHIVNKFAYKLVGPSVYDEPLVLNKGIVYSGERKLTSLGVDVSGERIVQAMGELDSISEQELFLTNLWGYSKETDIKVRIIQDNLKILTDNYFVQLKNSLKTFAEWLNLGNYMLCYSKTLDTIMISDVSGRIKLKGVICRKLIEDEVMEVE

SEQ ID NO: 24 - protein, 2221 aa, Tamiami virus
  L protein in Tamiami virus
MSECLTYFNELKDLVRKWVPDEDTYVEQKTVLLSQVNFSSIVTEGLKLLSTLIEVDSCVKHGCIHNRSKTVNQILYDHRIVGPTLPDVVPDGYRVSGSTLILLETFVRVNQESFECKYRHDFEKLMQLSKDLAKCGLTLVPVIDGRSSYYIERLPDWVIERMRWLLLRIMSNLRDSGEKIEEMEYERLVHSLSNMENQNLGLESLASLREEGLDYKTRLTKTLKEGIYSNMTTSECRVGIAKLYDHFCLLRDSGQYEDVYTTTSRSEMITWLKTHELVQMSSSERETLIEAETCKFCQIHMYAVLKDLVLLRKGWKGSRCRDANEILAHKSLLSDCNKIKGLKVLNTRRNTLLCLDIIVLNSLINLIKLQYTDLQYLINNHFKSVNDRLVSVDLIINKLDKRLTSDPNWLCKLRTKIGHKLKIYDLDHVISWLRPIEVSHWYEFKLERDNSGECVKPTIKYKKSGVGDCQGEDCNKDVITDDSTFSDYLDALSTLSMGLMNSMKTSSATKLVVNDERNYFGTVQCDECYFQDLDINYGTTLIYQKTGEGTRCYGKVSKEGGGPDVYKVGKSFYADPKRYFLPIMSSEVILKMCREMLSWLDWLSEKEMMDVRTKLYTLVISILTVPSKRVQIYLQGFRYFIMAYVNEFHVKELVCKLKVKPLTRAELSVFTQMDDLVALLLTGTSEEHMTKSFKFILNLSYLCHLITKETPDRLTDQIKCFEKFLEPKLTFNSVILNLDSSPQLTEGTEEKIIGDLKKLFSKDLGVLDLKEPGVSKEVLSLCSSCFNNGMLSLPKVLSRDPQSPSFTSTALDISSNKSVVVPKLNEVGETITQYDYQSLLSSVVVEMAQSFKDKLRFKLDRRSLQYAIYKRLTNMVSKNEFRSKDDPNDSGILEDIEDLVDEGTHKLINEIEANVSDCLSKMSSGCNKSNQSSKGLKKFEKVDLLQKLWSREYMSLILSETSFHEVKDFDPSLLPSESYQEMCDAVYDSVYRNEFFTEKFLKLCPLELLIKNLATKHYEEGDYFECFKYLLIGAGCDNRVGRFDHRSRARLGFKDTATLVKEESRISSRESNSEAISKRLDKSFFTNSSLRNLCFYSEESPTYRSSVSSSVGKLKFGLSYKEQVGSNRELYIGDLNTKLTSRLIEDYFESLTSECRFSCLNNDSEFERALLDMKSVVRLSGLAVSLDHSKWGPYMSPAIFNALFSNLDLQLKDGGLIDKSPIENLLNWHLHKIVEVPYNVVEAYLKGYTKRSLGLMDRSSSSMTEDYFFRQFAKGVVPSHITSVLDMGQGILHNASDYYGLLTEQFITLCLELCFDVKMTAYTSSDDEIMLSNSYSLKRESDDDLLDMEKCKEILEFHYYLSSKLNKFISPKTVAGSFASEFKSRFFIWSQEVPLLTKFVAAALHNVKAKSPHQLAETIDTILDQCAANGVSIEIINELSKRTNRLISYSGHPVDPFLCVFTTDLKDWVDGSRGYRLQRSIESIINSEEILSTIRDSCRQLFYMIRSGRIQEEYLISALQSSPDDCLRQMLKITGTNDSLIEEALTTRWLNLRAFGDLRLVLRTKIMTGTRILDKEEVPSLIKSVQSKLSKNFVRGAKKIITDAINKSAFQSSICSGFIGLCKSMGSKCVRDGSGGFIYIKDLLKKIDRHTNCEVCCPLLSVFCEHSLRQVAPYSRPLLWDYFSLTFSNACELGNWVFSKVELPRPPLGSMNPNFFWPVKPGSHSELEDKVNMNHVLYSIKRNFPDLFDEHIAPFLSDLNSLKVSWVQRIKFLDLCVAMDMSSECLGIISHIMRKRREELYIVKQEELSVCHIRESCSLEKGLQLNSVEICQNFLTQLLFESMLNPVLLSTSQFKKYFWYGEVEFLPNDADHDLGQLTQFIMDCKLLNISRCMCLDDLDVGYVHSKIELSQVFINLSTFINLVDWENRESYQSFDEVLIHSNADHIPLEIGIILSHTRKSFKFRYERKTNYYVKCGITIQKSEISSFSTTLSDGFELHVEEIDCYVSGSEGDHISLDGVGLVPLHPLFSGKEALDLNKLLSDQDIEFKQISLVFSKVKLDFKDHVKDLKNKFSYKLQGPEQGLEPLHLDKGQIMERNTVVSRLEVPVTSRSLFLALEALDPGNRPRFLSSLHEYMRKRPGKKDPCFVRMTQQDLCLLVELYEAAFMQVLSAVSDWIEFGCFALCFSKTLNCIMIADDGGDYRLKGRPCKTLSAQKTLTDIE

SEQ ID NO: 25 - protein, 58 aa, lymphocytic choriomeningitis virus
  GP signal peptide in LCMV
MGQIVTMFEALPHIIDEVINIVIIVLIIITSIKAVYNFATCGILALVSFLFLAGRSCG

SEQ ID NO: 26 - protein, 58 aa, Lassa virus
  GP signal peptide in Lassa virus
MGQIITFFQEVPHVIEEVMNIVLIALSLLAILKGVYNVATCGIIGLVTFLFLCGRSCS

SEQ ID NO: 27 - protein, 58 aa, Pichinde virus
  GP signal peptide Pichinde virus
MGQVVTLIQSIPEVLQEVFNVALIIVSTLCIIKGFVNLMRCGLFQLITFLILAGRSCD

SEQ ID NO: 28 - protein, 58 aa, Junin virus
  GP signal peptide in Junin virus
MGQFISFMQEIPTFLQEALNIALVAVSLIAIIKGIVNLYKSGLFQFFVFLALAGRSCT

SEQ ID NO: 29 - protein, 58 aa, Oliveros virus
  GP signal peptide in Oliveros virus
MGQVIGFFQSLPNIINEALNIALICVALIAILKGIVNIWKSGLIQLFIFLILAGRSCS

SEQ ID NO: 30 - protein, 58 aa, Tamiami virus
  GP signal peptide in Tamiami virus
MGQLISFFGEIPTILQEALNIALIAVSIIATIKGVVNVWKSGLIQLLMFVMLAGRSCS

SEQ ID NO: 31 - protein, 207 aa, lymphocytic choriomeningitis virus
  GP1 in LCMV
MYGLNGPDIYKGVYQFKSVEFDMSHLNLTMPNACSANNSHHYISMGSSGLELTFTNDSILNHNFCNLTSAFNKKTFDHTLMSIVSSLHLSIRGNSNHKAVSCDFNNGITIQYNLSFSDPQSAISQCRTFRGRVLDMFRTAFGGKYMRSGWGWAGSDGKTTWCSQTSYQYLIIQNRTWENHCRYAGPFGMSRILFAQEKTKFLTRRLA

SEQ ID NO: 32 - protein, 199 aa, Lassa virus
  GP1 in Lassa virus
LIYKGSYELQTLELNMETLNMTMPLSCTKNSSHHYIRVGNETGLELTLTNTSIINHKFCNLSDAHKRNLYDHALMSILSTFHLSIPNFNQYEAMCDFNGGKISVQYNLSHAYAVDAAEHCGTVANGVLQTFMRMAWGGSYIALDSGRGNWDCIMTSYQYLIIQNTTWEDHCQFSRPSPIGYLGLLSQRTRDIYISRRLL

SEQ ID NO: 33 - protein, 215 aa, Pichinde virus
  GP1 of Pichinde virus
GMMIDRRHNLTHVEFNLTRMFDNLPQSCSKNNTHHYYKGPSNTTWGIELTLTNTSIANETTGNFSNIRSLAYGNISNCDKTEEAGHTLKWLLNELHFNVLHVTRHVGARCKTVEGAGVLIQYNLTVGDRGGEVGRHLIASLAQIIGDPKIAWVGKCFNNCSGGSCRLTNCEGGTHYNFLIIQNTTWENHCTYTPMATIRMALQKTAYSSVSRKLL

SEQ ID NO: 34 - protein, 193 aa, Junin virus
  GP1 in Junin virus
EEAFKIGLHTEFQTVSFSMVGLFSNNPHDLPLLCTLNKSHLYIKGGNASFQISFDDIAVLLPQYDVIIQHPADMSWCSKSDDQIWLSQWFMNAVGHDWHLDPPFLCRNRAKTEGFIFQVNTSKTGVNGNYAKKFKTGMHHLYREYPDPCLNGKLCLMKAQPTSWPLQCPLDHVNTLHFLTRGKNIQLPRRSLK

SEQ ID NO: 35 - protein, 225 aa, Oliveros virus
  GP1 in Oliveros virus
HTFQIGRNHEFQSITLNFTQFLGYAPSSCSVNNTHHYFRGPGNVSWGIELTLTNNSVINASNSLKVFTNIHHNITNCVQNIDEQDHLMKWLIETMHLQIMKPGKRLPPILCEKDKGLLIEYNLTNIASREEKHSEYWSQLLYGLSKLLGSSKSLWFDYCQRADCMMQEHSSHLKCNYSECSGHTTFKYLILQNTTWENHCEFNHLNTIHLLMSSTGQSFITRRLQ

SEQ ID NO: 36 - protein, 193 aa, Tamiami virus
  GP1 in Tamiami virus
VQIGHHLELEHIILNSSSILPFTPTLCKLNKTYFLVRGPFQAHWGVDLAIGSTTVAVENATKTYTLKSKNFTGCFEGNPDPDSAALLVTWLFNSLHHDYKNDPSILCERVSGENSFRFQINISEPEYCEKILSRMANLFGSFENYCLNNRHIKKLIIIRNLTWSQQCHENHMSAMQLITSNIHTQVVRARRIL

SEQ ID NO: 37 - protein, 233 aa, lymphocytic choriomeningitis virus
  GP2 in LCMV
GTFTWTLSDSSGVENPGGYCLTKWMILAAELKCFGNTAVAKCNVNHDEEFCDMLRLIDYNKAALSKFKQDVESALHVFKTTVNSLISDQLLMRNHLRDLMGVPYCNYSKFWYLEHAKTGETSVPKCWLVTNGSYLNETHFSDQIEQEADNMITEMLRKDYIKRQGSTPLALMDLLMFSTSAYLISIFLHLVKIPTHRHIKGGSCPKPHRLTNKGICSCGAFKVPGVKTIWKRR

SEQ ID NO: 38 - protein, 232 aa, Lassa virus
  GP2 in Lassa virus
GTFTWTLSDSEGNETPGGYCLTRWMLIEAELKCFGNTAVAKCNEKHDEEFCDMLRLFDFNKQAIQRLKSEAQMSIQLINKAVNALINDQLIMKNHLRDMMGIPYCNYSKYWYLNHTSSGRTSLPKCWLVSNGSYLNETHFSDDIEQQADNMITEMLQKEYIDRQGKTPLGLVDLFVFSTSFYLISIFLHLIKIPTHRHIVGKPCPKPHRLNHMGICSCGLYKQPGVPTRWKR

SEQ ID NO: 39 - protein, 235 aa, Pichinde virus
  GP2 in Pichinde virus
GFFTWDLSDSTGQHVPGGYCLEQWAIVWAGIKCFDNTVMAKCNKDHNEEFCDTMRLFDFNQNAIKTLQLNVENSLNLFKKTINGLISDSLVIRNSLKQLAKIPYCNYTKFWYINDTITGRHSLPQCWLVHNGSYLNETHFKNDWLWESQNLYNEMLIKEYEERQGKTPLALTDICFWSLVFYTITVFLHLVGIPTHRHIIGDGCPKPHRITRNSLCSCGYYKIPKKPYKWVRLGK

SEQ ID NO: 40 - protein, 234 aa, Junin virus
  GP2 in Junin virus
AFFSWSLTDSSGKDTPGGYCLEEWMLVAAKMKCFGNTAVAKCNLNHDSEFCDMLRLFDYNKNAIKTLNDETKKQVNLMGQTINALISDNLLMKNKIRELMSVPYCNYTKFWYVNHTLSGQHSLPRCWLIKNNSYLNISDFRNDWILESDFLISEMLSKEYSDRQGKTPLTLVDICIWSTVFFTASLFLHLVGIPSHRHIRGEACPLPHRLNSLGGCRCGKYPNLKKPTVWRRGH

SEQ ID NO: 41 - protein, 235 aa, Oliveros virus
  GP2 in Oliveros virus
AFLTWTLSDATGNDLPGGYCLEQWAIVWAGIKCFGNTAVAKCNQNHDSEFCDMLRLFDYNRNAIKSLNDQSQSRLNLLTNTINSLISDNLLMKNKLAEIMNIPYCNYTKFWYINDTRTGRHTLPQCWLISNGSYLNETKFRTQWLSESNALYTEMLTEDYDKRQGSTPLSLVDLCFWSTLFYVTTLFAHLVGFPTHRHILDGPCPKPHRLTKKGICSCGHFGIPGKPVRWVKRSR

SEQ ID NO: 42 - protein, 234 aa, Tamiami virus
  GP2 in Tamiami virus
SFFTWSLSDAVGNDMPGGYCLEKWMLIASQLKCFGNTAVAKCNLNHDSEFCDMLRLFDFNRKAIETLQNKTRSQLNIAINAINSLISDNLLMKNRVKELMDIPFCNYTKFWYVNHTKLNHHSLPRCWLVKNGSYLNESEFRNDWLLESDHLISEILSREYEERQGRTPLSLVDVCFWSTLFYTASIFLHLIRIPTHRHIVGEGCPKPHRLRADSTCACGLYKQKRRPLKWVRSN

SEQ ID NO: 43 - protein, 9 aa, Artificial Sequence
  Peptide epitope derived from P1A
LPYLGWLVF

SEQ ID NO: 44 - protein, 9 aa, Artificial Sequence
  Immunodominant NP-derived backbone epitope
RPQASGVYM

SEQ ID NO: 45 - protein, 9 aa, Artificial Sequence
  Peptide epitope derived from HPV16 E7 protein
RAHYNIVTF

SEQ ID NO: 46 - protein, 9 aa, Artificial Sequence
  Immunodominant NP-derived backbone epitope
FQPQNGQFI

SEQ ID NO: 47 - protein, 8 aa, Artificial Sequence
  NP-derived backbone epitope
YTVKYPNL

SEQ ID NO: 48 - protein, 561 aa, Allpahuayo virus
  glycoprotein precursor(GPC) protein in Allpahuayo virus(ALLV)
MSSENVPSFRWTQSLRRGLSNWTHAVKGDVLADARAIVSALDFHQVAQVQRMMRKDKRSEADLTRLRDMNKEVDALMMMRSAQKDNILKVGGLSKDELMELASDLDKLRKKVQRTEGGGQPGVYAGNLTSSQLNQRSEILKMMGMGTGPRGPVGGVVKVWDIKDSSLLVNQFGSMPALTIACMTQQGGEQMNDVVQALTSLGLVYTVKYPNLSDLEKLTEKHPCLKLITQEPAQINISGYNLSLSAAVKADACMIDGGNMLETLQVKPSMFSTLIKTILEVKNREGMFVSPSPGQRNPYENILYKVCLSGDGWPYIGSRSQIKGRAWENTTVDLEGKPSVNHPPVRNGGSPDLKQIPKTKEDEVIRAIEQLDPRGTTWVDIEGPPGDPVELALFQPETGNYLHCYRRPHNENAFKDQSKFSHGLLLKDLADTQPGLISCIIRHLPNNMVLTAQGNDDIIKLLEMHGRRDIKVLDVKLSSDQARLMEDVVWERYNMLCVKHTGLVIKKKKKGAAPGSANPHCALLDCIMFDATVTGYLRDQKPKRLLPLDTLYRDNANLINL

SEQ ID NO: 49 - protein, 561 aa, Allpahuayo virus; identical to SEQ ID NO: 48
  NP protein in ALLV

SEQ ID NO: 50 - protein, 95 aa, Allpahuayo virus
  Z protein in ALLV
MGLRYSKEVRDRHGDKDIEGRVPMTLNLPQGLYGRFNCKSCWFVNKGLIACGDHYLCLGCLTRMLSRTDFCEICSKPLPKKIIFEDSPSAPPYEP

SEQ ID NO: 51 - protein, 2201 aa, Allpahuayo virus
  L protein in ALLV
MDVHLIELRDLVRKWVPDDLELSEQKNIMLAQTQIRATVVESLKLLSTIVEVDSCKKHSCVHNTSKTVNAILREHKIIGPTLPDVTPDGYCVIGDVLILLEVFVRTNQESFEKKFNQDFEKLMQMSADLKKCGVTLVPTIDGRSTYYVDFIPDWVVERLRWLISRLMSSLREDGQEIEELEYERLISSLSSLENQSLGLESLLAMREKGLSYKETLDKLFLEGMENKLTVDESRTRIMKMFQIFRTLLESGYLERKYQTTDREDMLKRLRDHEFIVCSKSVEYTFDCPNCSVHLYKVLNLLLNQGSRGAPHQCLGEYMKTLSICNKIKSMKILNTRRNTLLILDTIMLNKFLDLEKVFGHVVVERVMIMQSLMTVNDRLLSIDVLMEMLEKKMTRNPLWFLKVNEKLRKLCPPEVYQSIEEYVHEVDRDHWFELKLTLHQTWPAKPLIDYKGKMRCTCVEKDSNNKNQLSDLTEEKFQLLLKKLSSFCLGITNSLKTSAVAKLRVNQPDDYYGKVTCSEVFFQSLDKEHSAVLLYQKTGEKSRAYGLAFNNVVTGQYTTEASFYCDPKRFFLPIMSDVVLFRMCNEMLSWLDYLSDDVMLEVRTCLYRLVLSILCTPSKRVQVYIQGLRYFIMAFVNEFHCTGLLDKLKVTALTESERYCMKLCDDLVVKVLNSVEDENMAKAFKFVLNTSYLCHLITKETPDRLTDQIKCFEKFLEPKLDFGSVIVNPDSSCELTAGQEEQFYQGLEKLFTDKKLESSYANKPGVCKEVLNVCMSLFNSGALEVKPLLNHDPITPSFTSTALDLSSNKSVVVPKLDELGEVLTEYDYSKLVSSVVVDLVEHFKTKGKYVVSPRSLQYKIYKRLSNLVQQRAGKGNKESELTEEEFLEQVTAEQLEVINKVETKVSRTLSGIKLSSDTENAKHDDDYHLKKLWSKDIMVRIKAETSLHEVKDFNVDTLPFDLYRELVDAIYNDPAANSHYFSERIFNPCPLELLIKNLTLKAYKEEDFFECFKYILISSNFDNKVGKYDHKNRSRLGLSSAALLVKDEARISMRESNSESIAKRLDKSFFTNSSLRNLCFYSDESPTERTSVSSNVGKLKFGLSYKEQVGGNRELYVGDLNTKLTTRLVEDYAESLTSDMKYTCLNNENEFERALLDMKSVVRQSGLAVSMDHSKWGPHMSPALFSLMLRGLDFRLKDGTLIDKEAVVNILSWHIHKMVEVPFNVVEAYLKGFIKRGLGLMDRGGATRVEEFMFGYFDQGIVPSHISSVIDMGQGILHNLSDLYGLITEQFIVYALDLCYSSSFMAYTSSDDEILLSISNSFKRNDGSMDMDLAIEALEFHYFLSDRLNKFVSPKTVAGTFASEFKSRFFIWSQEVPLLTKFVAASLHNVKAKAPSQLAETIDTILDQSVANGVSIEIIGAIAPRTNALITYSGHPFNLFLCLEETDVRDWVDGSRGYRLQRSIENAFPDDVLPEIIRSACRKIFYRIQSGTLEEDYIVTTLQQSPDDCLKQMLTSCDVEKEAIDDICNYRWLNLRAHGDLRLVLRTKIMTSTRTLQKEEVPSLIKSVQSKLSKNFVRGAKKILADAINKSAFQSCISSGFVGVCKSMGSKCVRDGKGGFKYIKDILKEIKHHEKPDCHFCKELKGIYCSELLENISEFSRPLFWDYFSLVLSNACELGNWVFCKIEIPKSVYHLNNPNHFWPIKPSSHAELEEKVGMNHVLYSIRRNFPVLFDEHISPYLSDLNMLKLNWVQKIRFLDICVAIDMTSECLGIISHIIRRKREELYIVKQSELSMSHTRVSLPLERGFNIEPDEVCHNFLLQILFESMIHPVLLTTSQFKRYFWYSEVELLPKEALHDLGQFTQFIIDCKVLNSSRAMCLDDLDVGYVSSKVKRTDTYLNLSTFMTNLDWENRHEYSSFEDLILSSPSEVFLFEITFTFSHIRRSHKFRYDRSTNYILKTKLVIEKSELVNGEDGVYCVTPHSIEYYVSQSSGNHISLDGVSLLVLDPLISGRELVNMDELLQNQDVTFSAPSQILSKIKLDFKPFTKEIKNKFSYKLIGPDVDMSPLHLDKGAIKEGDRIVSQIEIQVSFKSVITAIELLDEDQRKIFVGNLFVYLTSLKSVNRALSMSESDLRLLVENYPSVIEYMLSGCDGWLNCGSFSLIKSKTLQCIMLADERGPYRIKGQNCRRLFPTEEAIEIE

SEQ ID NO: 52 - protein, 491 aa, Mobala virus
  glycoprotein precursor(GPC) protein in Mobala virus(MOBV)
MGQIVTFFQEVPHIIEEVMNIVLITLSLLAILKGIYNVMTCGLIGLLTFLFLCGKSCSTIYKDNYRLMQLNLDMSGLNATMPLSCSKNNSHHYIQVFNTTGLELTLTNDSLIGHKWCNLSDAHKKDTYDHTLMSIISTFHLSIPNFNHYEAMACDFNGGKISIQYNLSHSSETDAMNHCGTVANGVLEVFRRMTWCTHCDTPLGASIAGFNCVRTSYKYLIIQNTTWEDHCTMSRPSPMGYLSLLSQRAREIYISRRLMGTFTWTLSDSEGNDLPGGYCLQRWMLIEAEMKCFGNTAVAKCNQQHDEEFCDMLRLFDFNKEAIHRLRVEAEKSISLINKAVNSLINDQLIMRNHLRDIMGIPYCNYSRFWYLNDTRSGRTSLPKCWMVSNGSYLNETHFSSDIEQEANNMITEMLRKEYERRQGTTPLGLVDLFVFSTSFYLISVFLHLIKIPTHRHLVGKPCPKPHRLNHMGVCSCGLYKQPGLPTKWKR

SEQ ID NO: 53 - protein, 58 aa, Mobala virus
  GP signal peptide in MOBV
MGQIVTFFQEVPHIIEEVMNIVLITLSLLAILKGIYNVMTCGLIGLLTFLFLCGKSCS

SEQ ID NO: 54 - protein, 201 aa, Mobala virus
  GP1 protein in MOBV
TIYKDNYRLMQLNLDMSGLNATMPLSCSKNNSHHYIQVFNTTGLELTLTNDSLIGHKWCNLSDAHKKDTYDHTLMSIISTFHLSIPNFNHYEAMACDFNGGKISIQYNLSHSSETDAMNHCGTVANGVLEVFRRMTWCTHCDTPLGASIAGFNCVRTSYKYLIIQNTTWEDHCTMSRPSPMGYLSLLSQRAREIYISRRLM

SEQ ID NO: 55 - protein, 232 aa, Mobala virus
  GP2 protein in MOBV
GTFTWTLSDSEGNDLPGGYCLQRWMLIEAEMKCFGNTAVAKCNQQHDEEFCDMLRLFDFNKEAIHRLRVEAEKSISLINKAVNSLINDQLIMRNHLRDIMGIPYCNYSRFWYLNDTRSGRTSLPKCWMVSNGSYLNETHFSSDIEQEANNMITEMLRKEYERRQGTTPLGLVDLFVFSTSFYLISVFLHLIKIPTHRHLVGKPCPKPHRLNHMGVCSCGLYKQPGLPTKWKR

SEQ ID NO: 56 - protein, 568 aa, Mobala virus
  NP protein in MOBV
MSNSKEIKSFLWTQSLRRELSGFCTNTRVQVIKDAQSLLHGLDFSEVSNIQRLMRKEKRDDSDLKRLRDLNQTVNNLVELKSSQQKNTLRVGALTSDDLLVLAADLDRLKAKVNRSERPLTGGVYMGNLTQQQLDQRKILLQLVGMGGSRVPPRGGDGIVRVWDVRNPDLLNNQFGTMPSLTLACLCKQGQEDLSDVVKALTDLGLVYTAKYPNLSDLDKLTHTHPVLGLIDGNKSAINISGYNFSLNAAVKAGASLLDGGNMLETIKVTPKNIDTILKCVLKVKRSVGMFVSDTPGERNPYENILYKICLSGDGWPYIACRTSISGRAWDNTEVDLGTNKDPINKGPPTSNKTAGAAGFNAGLTYSQMMELKDSMLQIDPTAKTWVDIEGRADDPVEIAIYQPSNGHYIHFYREPTDIKQFRQDAKYSHGIDVQDLFTTQPGLTSAVLENLPKNMVLTCQGVEDIRKLLDSQGRKDIKLIDVSMQKADARKFEHQIWDEYKHLCSMHTGIVVEKKKRGGKEEITPHCALLDCLMFEATTRNSLDIVIPRPVLSKDLVFRSATPKVIL

SEQ ID NO: 57 - protein, 99 aa, Mobala virus
  Z protein in MOBV
MGQKPSKPKAPPTTYESPRSSLTPDATGFGPEFCKSCWFERKGLIKCQNHYLCMTCLTLLLTVSNRCPVCKYPLPTKLRLEKSPTAPPPEATNPPPYSP

SEQ ID NO: 58 - protein, 2220 aa, Mobala virus
  L protein in MOBV
MEEQISEVKDIISKYLSNDDRLAKQKLAFLVQSEPKLLLIEGLKLLSLCIEIDSCEANGCDHNTKELSVENFLSENRVLCPGLPMVVPDGFKLNGNVLMILECFVRSSPANFEQKYREDLVKLNSLKEDLMTVGITMLPLIDGRTNFQTDRLPEWANERFRTLLFSLLAFSQESSRMFEEAEYSRLCESLNVSGGKRSGIENINILSDHRSEHFDELLKLCHVGINNHMSSLDVKREIIQEFQAFRNKLQNGVIERQFLRVNREELIKAFNEMYTLRVGDKPELLDSLLNDYYHSCPLITMLYCELPNGKSCQSDISHVRGWRSLLNKVKSLRLINTRRKLMLIFDSILLLAHMKDLSVNGHLVESEWMGSSFLSVNDRLVSLPATQKDLKTWLQRRTNRLSHSHQSQSAYEVFSTMVNRVLNKAKEVLLLVNLTFKDYNVDEDILSESSFTEMMSLEVNGVEPTINYEKNPIDRFSYNIQAMDPDNQSDLKRLSSISLALVNSMKTSSTVKLRQNEHGKLRYKCVRCKEAYYQDFLIEGHRLMLIYQKTGECSKCYSVNDAVVGELCSFYADPKRYFPAIFSDSVLQEMIDTMISWLTECSELKEFIKEIKSLLKMVVMVVLTNPTKRIQKFLQNLRYFTMAYVSEYHHKDLLEKLREDLITNCEFLLYRITRSILNIVFNVNVTTMITNRFKFILNLSYLCHLITKETPDRLTDQIKCFEKFIEPKMKFDSVNVNPLEPADQEELRSLLMSADKFLSKPDCFGDEGILFKTPGVSRKIFSMMVSSFNNGSLFKQAELKNGVKDPLVVSGCATALDLASNKSVVVNKYTDGDRIIEYDYDKLVATAVCQLSEVFSRKGKYVLSKEDYDFKIQQIMSDLVIGRSKLHGSEIGLNSCEEVDEVLIEGGAADYFDSIKQSVDTVMSKFSWSGSESSATLKSECSIDDLSLALQDKAQLRLIRNELSCHMVEDFDVMTLPYDTYEEICKSVYSDPSLRSKYFYLESLESCPLTKMAQAVCTRTFHDEEYFQCFKSLLLQMNANKLSGKFNHYKSKCLNFKLDRDRLFNETRISERESNSEALSKALSLTNCTTAALKNLCFYSQESPQSYNSQGPDTGRLKFSLSYKEQVGGNRELYIGDLRTKMFTRLIEDYFEALTSQFKGSCLNDEHEFENAVFSMKFNVSLGLLSYSLDHSKWGPMMTPFLFLATLQNINWPSLDTLSDAKSRDYVSSMLSWHIHKLVEVPFNVVTAMMKSFIKSKLGLKKNLSETMTERFFFEHFRLGKVPSHISSILDKGQGILQNTSDFYGLISERFINYCISCLYEGNVDAFTSSDDQISLFDKSLSDLLEKDPDEFEYILEFHNYLSDQLNKFISPKSVKGNFAAEFKSRFFVWGDEVPLLTKFVAASLHNIKCKEPHQLAETIDTIIDQAVANGVPVKLCNIVQERTLNLLRYAQYPIDPFLMFCSSDVKDWVDGNRGYRIMRNIEMLEPNGTRKVRSFLRRLYNNLKTGLLHEEFTAAYLSGDPYQSLAKLSKIFDTEILNDEELGLSWLNLSAYYPLRMVLRQKVIYTGAVNVEEEKLPTIVKTLQNKLSSNFTRGAQKLLSEAINRSAFQSCIASGFVGLCRTLGSKCVRGPERENFYIKSIMNQSMMMEGVSRELVMGVDVWRVRNPLDNSRAQQKWGNYFRPILWDYLCIALSTALEIGSWVLGEPKLKSPLPQMKFRPCDYFPMKPSVTRLLEDKVGFNHIIHSFRRLYPDIFEKHLLPFMSDLASTKMKWSPRVKFLDLCVMLDVNCEAMSLVSHIVKWKREEHYVILSDELSISHDRSHESLADERVVSTEDVSENFLRQIYFESFARPFVATSRTLGSFTWFPHKTSLPESEGLASLGPFGTFIEKVIFKGIERPMYRHDLFSGYAWLDFDFGEFYINSSKLIQYGLTEMRYFEDLSEFMSMLSSLKPGSIEISLTVNFQVKSQGESLREKFFIHCKFYGSFDVDGKFEFNNIGVQYSGAINRSAVLDCWRLILTNSHFLGDKVIWHLNTANIKDYLKDGSMVGEVVPIEVIINRDALRLDTLDFERVGPDVNVVPLVVKDGYIFEGDKKLVPFNPSIHDQDFEILVKELCIDDKELLKDMIQKMITVRGSQGLQWHSLDIVAVLTKNMPTNYKDFITESLSVLDSWTGFKGYSLCFSKTKNTLMIHTSEGNLRLKGKLCRKLFDDPVHVEDIE

SEQ ID NO: 59 - protein, 489 aa, Mobala virus
  glycoprotein precursor (GPC) protein in Mopeia virus(MOPV)
MGQIVTFFQEVPHILEEVMNIVLMTLSILAILKGIYNVMTCGIIGLITFLFLCGRSCSSIYKDNYEFFSFDLDMSSLNATMPLSCSKNNSHHYIQVGNETGLELTLTNTSIIDHKFCNLSDAHRRNLYDKALMSILTTFHLSIPDFNQHEAMSCDFNGGKISVQYNLSHSNYVDAGNHCGTIANGIMDVFRRMYWSTSLSVASDISGTQCIQTDYKYLIIQNTSWEDHCMFSRPSPMGFLSLLSQRTRNFYISRRLLGLFTWTLSDSEGNDMPGGYCLTRSMLIGLDLKCFGNTAIAKCNQAHDEEFCDMLRLFDFNKQAISKLRSEVQQSINLINKAVNALINDQLVMRNHLRDLMGIPYCNYSKFWYLNDTRTGRTSLPKCWLVTNGSYLNETQFSTEIEQEANNMFTDMLRKEYEKRQSTTPLGLVDLFVFSTSFYLISVFLHLIKIPTHRHIKGKPCPKPHRLNHMAICSCGFYKQPGLPTQWKR

SEQ ID NO: 60 - protein, 58 aa, Mobala virus
  GP signal peptide in MOPV
MGQIVTFFQEVPHILEEVMNIVLMTLSILAILKGIYNVMTCGIIGLITFLFLCGRSCS

SEQ ID NO: 61 - protein, 199 aa, Mobala virus
  GP1 protein in MOPV
SIYKDNYEFFSFDLDMSSLNATMPLSCSKNNSHHYIQVGNETGLELTLTNTSIIDHKFCNLSDAHRRNLYDKALMSILTTFHLSIPDFNQHEAMSCDFNGGKISVQYNLSHSNYVDAGNHCGTIANGIMDVFRRMYWSTSLSVASDISGTQCIQTDYKYLIIQNTSWEDHCMFSRPSPMGFLSLLSQRTRNFYISRRLL

SEQ ID NO: 62 - protein, 232 aa, Mobala virus
  GP2 protein in MOPV
GLFTWTLSDSEGNDMPGGYCLTRSMLIGLDLKCFGNTAIAKCNQAHDEEFCDMLRLFDFNKQAISKLRSEVQQSINLINKAVNALINDQLVMRNHLRDLMGIPYCNYSKFWYLNDTRTGRTSLPKCWLVTNGSYLNETQFSTEIEQEANNMFTDMLRKEYEKRQSTTPLGLVDLFVFSTSFYLISVFLHLIKIPTHRHIKGKPCPKPHRLNHMAICSCGFYKQPGLPTQWKR

SEQ ID NO: 63 - protein, 570 aa, Mobala virus
  NP protein in MOPV
MSNSKEVKSFLWTQSLRRELSGYCSNIKIQVIKDAQALLHGLDFSEVANVQRLMRKEKRDDSDLKRLRDLNQAVNNLVELKSVQQKNVLRVGTLTSDDLLVLAADLDRLKAKVIRGERPLAAGVYMGNLTAQQLEQRRVLLQMVGMGGGFRAGNTLGDGIVRVWDVRNPELLNNQFGTMPSLTIACMCKQGQADLNDVIQSLSDLGLVYTAKYPNMSDLDKLSQTHPILGIIEPKKSAINISGYNFSLSAAVKAGACLIDGGNMLETIKVTKSNLEGILKAALKVKRSLGMFVSDTPGERNPYENLLYKLCLSGEGWPYIASRTSIVGRAWDNTTVDLSGDVQQNAKPDKGNSNRLAQAQGMPAGLTYSQTMELKDSMLQLDPNAKTWIDIEGRPEDPVEIAIYQPNNGQYIHFYREPTDIKQFKQDSKHSHGIDIQDLFSVQPGLTSAVIESLPKNMVLSCQGADDIRKLLDSQNRRDIKLIDVSMQKDDARKFEDKIWDEYKHLCRMHTGIVTQKKKRGGKEEVTPHCALLDCLMFEAAVIGSPQIPTPRPVLSRDLVFRTGPPRVVL

SEQ ID NO: 64 - protein, 103 aa, Mobala virus
  Z protein in MOPV
MGKTQSKGQPSTNLLKETEPRHPVIPDARGTGPEFCKSCWFERRGLVRCNDHYLCLNCLTLLHTVSDRCPICKHKLPFRLELQTQPTAPPEIPPSQNPPPYSP

SEQ ID NO: 65 - protein, 2237 aa, Mobala virus
  L protein in MOPV
MEELLSESKDLVSRYLLEDERLSKQKLAFLVQTEPRMLLIEGLKLLSLCIEIDSCKANGCEHNSEDLSVEILLQRQGVLCPGLPFVVPDGFKFSGNTLILLECFVRTSPINFEQKYKEDTIKLESLKPDLSSVDIILLPLIDGRTNFYTDLFPEWANERFRHILFSLLEFSQQSSKMFEESEYSRLCESLTKAGVRTSGIESLNVLTDSRSDHYERVLELCHRGINNKMSILDVKKEIVSEFHAFRNKLKEGEIERQFVRTDRRQLLRDFNNLYIDREGDTPSEIDPLKERFVKSSPMVTALYGDYDRYRQEGVDRDSCLQNHFQSSVPGWKSLLNKIKSLKLLNTRRKLMLTFDAIILLAHLKDLKCHGELLGSEWLGSSFLSVNDRLVSLQETQKDLKKWIERRMVSAMKKKGGVGTLCQRSELIFFDIINKLLTKAKEALSSASLCFRDYVKEEDILEEDSYERLMLMEKRGIQPTMSYEKEEGNQFPYPLIELEADSIEDLRRLSSISLALVNSMKTSSVAKVRQNEYGAARYKRVRCKEAFNQSFIMGSGNFNLIYQKTGECSKCYAINNPEKGEICSFYADPKRFFPAIFSHCVIYETINTMMSWLSECIELRDQQKTLKLLLKITMILILVNPSKRAQKFLQGLRYFIMAFVSDFHHKQLMEKLREDLITEPEHLLYSVVRSILNIILGEGVSTMLTNRFKFVLNLSYMCHFITKETPDRLTDQIKCFEKYLEPKLEFDSININPSEEGDEDERMLLLESANKFLSKETSMSNNRISYKVPGVSRKFFSMMTSSFNNGSLFKKGDDLSGFKDPLVTAGCATALDLASNKSVVVNKYTDGERILYYDHDKLVAASVCQLSEVFQRKTKYLLSKEDYDYKVQKAISDLVVGKKSGSSNPNSQGAPDELDELFLDSCALDCLEDVKKSVDVVLEKYRYDRKFPVGNGSEEKSLTDLRKVLGTEDVGCVYYRLIQAEIAHHMVEDFDESLLPGDAYEMICKGFFKDLELRSKYFYLDSLDSCPITCITQAVSTRTFNDQQFFQCFKSLLLQMNAGKLAGKYSHYKNKCLNFKIDRERLMNDVRISERESNSEALGKALSLTNCTTAVLKNLCFYSQESPQSYTSLGPDTGRLKFSLSYKEQVGGNRELYIGDLRTKMFTRLIEDYFEALTKQYRGSCLNNEKEFHNAILAMKLNVSLGQVSYSLDHSKWGPMMSPFLFLVFLQNLRWETRDDIEDIKSKDYVSTLLSWHIHKLIEVPFNVVNAMMRSYLKSRLGLKKSLHQTSTEAFFFEYFKQNRIPSHLSSIIDMGQGILHNASDFYGLVSERFINYCIKCLFEDEVDSYTSSDDQISLFGKDLSDLLSNEPEEFQAILEFHYFLSDQLNKFISPKSVIGSFVAEFKSRFYVWGDEVPLLTKFVAAALHNVKCKEPHQLAETIDTIIDQSVANGVPVTLCNAIQERTLNLLRYAQYPIDPFLLFLDSDVKDWVDGNRGYRIMRNIEAILPESTQKVRKVLRTVFNKLKLGELHEEFTAIYLSGDPADSFKKLTSLVGDDTLSEEDLSVCWLNLTTHHPLKMVMRQKVIYTGAVELGEEKLPTLVKTLQSKLSSNFTRGAQKLLCEAVNKSAFQSGIASGFIGLCKTLGSKCVRFSDRSTAYIKSLVSRLSALDSVSSLKVKGVDLWILGKEHTKAAEEALGFLRPVLWDYFCIALSTSLELGSWVLGEPKVKEKTSSIPFKPCDYFPMKPTTTKLLEDKVGFNHIIHSFRRLYPSLFERHLLPFMSDLASTKMRWTPRIKFLDLCVVLDVNCEAMSLISHVVKWKREEHYVVLSSDLAIAHERSHLPITDERVVTTYDVVQNFLRQIYFESFIRPFVATSRTLGSFTWFPHRSSIPESEGLDNLGPFSSFIEKVIYKGVERPMYRHDLYSGYAWLDFECAPAILNLGQLIASGLTEQHVFESVSELLEAFADLSVGSVQISVTVNFQVRSQGESLKEKFSLHLLFKGVVLEGGLFKPHSLDVTYSGSVQRSAIKDCWRVAQTSTWFKRETTSIWLLSTENICDYLRDSSPIPDVIPLSVLLNEEILDLEEHDFTHIGPEHVEIPLVVDSGYLIEGTRKLLPFNPNIHDQDLNVFIGELMEDHSEILERSLSKMLRSRMDQGLHWLQLDIIGVVGRCMPEGYENFLTRVFSGIDFWADFKGYSLCYSRSQASLMIQSSEGKFRLRGRLCRPLFEEVGPPLDIE

SEQ ID NO: 66 - protein, 495 aa, Ippy virus
  glycoprotein precursor (GPC) protein of Ippy virus (IPPV)
MGQIITFFQEVPHIIEEVMNIVLITLSLLAILKGVYNVMTCGLIGLISFLLLCGKSCSLIYKDTYNFSSIELDLSHLNMTLPMSCSRNNSHHYVFFNGSGLEMTFTNDSLLNHKFCNLSDAHKKNLYDHALMGIVTTFHLSIPNFNQYEAMACDFNGGNISIQYNLSHNDRTDAMNHCGTVANGVLDAFYRFHWGRNITYIAQLPNGDGTGRWTFCYATSYKYLVIQNISWADHCQMSRPTPIGFASILSQRIRSIYISRRLMSTFTWSLSDSSGTENPGGYCLTRWMLFAADLKCFGNTAIAKCNLNHDEEFCDMLRLIDFNKQALKTFKSEVNHGLQLITKAINALINDQLIMKNHLRDLMGIPYCNYSKFWYLNDTRTGRVSLPKCWMISNGTYLNETHFSDEIEQEADNMITEMLRKEYQERQGKTPLGLVDLFIFSTSFYSITVFLHLIKIPTHRHIVGQGCPKPHRLNSRAICSCGAYKQPGLPTKWKR

SEQ ID NO: 67 - protein, 58 aa, Ippy virus
  GP signal peptide of IPPV
MGQIITFFQEVPHIIEEVMNIVLITLSLLAILKGVYNVMTCGLIGLISFLLLCGKSCS

SEQ ID NO: 68 - protein, 205 aa, Ippy virus
  GP1 of IPPV
LIYKDTYNFSSIELDLSHLNMTLPMSCSRNNSHHYVFFNGSGLEMTFTNDSLLNHKFCNLSDAHKKNLYDHALMGIVTTFHLSIPNFNQYEAMACDFNGGNISIQYNLSHNDRTDAMNHCGTVANGVLDAFYRFHWGRNITYIAQLPNGDGTGRWTFCYATSYKYLVIQNISWADHCQMSRPTPIGFASILSQRIRSIYISRRLM

SEQ ID NO: 69 - protein, 232 aa, Ippy virus
  GP2 of IPPV
STFTWSLSDSSGTENPGGYCLTRWMLFAADLKCFGNTAIAKCNLNHDEEFCDMLRLIDFNKQALKTFKSEVNHGLQLITKAINALINDQLIMKNHLRDLMGIPYCNYSKFWYLNDTRTGRVSLPKCWMISNGTYLNETHFSDEIEQEADNMITEMLRKEYQERQGKTPLGLVDLFIFSTSFYSITVFLHLIKIPTHRHIVGQGCPKPHRLNSRAICSCGAYKQPGLPTKWKR

SEQ ID NO: 70 - protein, 570 aa, Ippy virus
  nucleoprotein of IPPV
MANSKEVKSFLWTQALRRELGQYCSTVKSSIIKDAQSLLHSLDFSEVSNIQRLMRKDKRNDSDLKRLRDLNQAVFNLVELKSTQQKNVLRVGKLTSDDLLVLAADLDRLKNKVMRTERPQTLGVYMGNLTNQQLDQRKRLLDMIGISNARNAPRPGADGVVRVWDVKDSSLLNNQFGTMPSLTLACMSKQGQYELNDVVQSLTDLGLVYAAKYPNAMDLEKLTQAHPVLSIIDVSKSSINVSGYNFSLSAAVKAGACMLDGGNMLETLKVTPQNLEDILASMLKVKRAHSMFVSDTPGDRNPYENLLYKVCLSGNGWPYIACRTSLTGRAWDNTVVDLGPPIDLSQNKQMSPAKPKGAGHGMPSGLTMSQILALKDLMAAVDPNAKTWIDIEGRAEDPVEIAFYQPQTGAYIHFYREPTDAKQFKQDSKYSHGIDIGDLFNVQPGLTSAVLELLPPNMVLTCQGSEDIRRLLDSQGRKDIKLIDVLMSKSEARKFEDEVWDKFGFLCKIHTGHVVEKKKRGNKEEITPHCALLDCLMYEAASTGRFSPGSIRAVLPRDMVFRAVTEKVAL

SEQ ID NO: 71 - protein, 89 aa, Ippy virus
  Z protein of IPPV
QCQAVHAKVVIVTSNKTPTLKPAALAKLWPHACCIWNDVCSVPCVFGLILDGLLFVSALVLSHAGLGDGLAIWRDCWRVLVGVVVAGLV

SEQ ID NO: 72 - protein, 2208 aa, Ippy virus
  L protein of IPPV
MEESLRETKLLISRYLRQDERIARQKLAFLGQSEPRSLLIEGLKLLSLCIEIDSCDTNCCTHNTEGQSVENFLFQNHILCPSLPLVVPDGMKLNGNILIILECFVRSNPTNFQQKYQEDSVKLDSLKGDLERAGISLIPIIDGRTSYYNSLMEEWVCDQFRHNLFKLLEFEQENNALFEESEYLRLCESLNVSGGRASGAQGLHSLLDCRGEHYNEILKACHIGIDPSIGGVELKGQIENLYQVFRQKLKKGVIKHQFRKVDQKSLLKEYCEMYKGIGICGVEETTVDALAAELPNISPILRYIHLRIDSESNAEVNEISNLPTGLRSAFNKVKSLKVLNTRRKLLLLIDTIILMSHCYVRELFPTLCERDWLGSSFFSVGDRLVSVGAIQHDLSKWLKRRLKANGGVGQKSTELHKMINTMIQKSSKALGDVGLSFESYGVSFDFLNKVGLEEIMRFKIVGVTPTISYIKTNQQPPIPLREFSAEDDSDLKMLSSLSLSLVNSMKTSSTVKTRQNAMGRERYRVVQCKECYYQELGNEYRDLVLLYQKTGEGSKCYSVNSKRVGEICSFYADPKRYFCPIFSENVITKVIDTMMTWLMGIVELEDSLRDIKKLTKMILLVILCQPSKRSQKLLQNLRYFIMAFVSDYHHVELFDKLREELITDAEFFLFKLLGKILTILLNDEVSTMLNNRFKFILNISYFCHFITKETPDRLTDQIKCFEKYLEPKIQFGSLTVNPKETPTDEEKDDILHGVNMFLSKKTCDEVDDPPSKKPGVSKKVFSLMLSAFNSGLLFKESELKKGMKDPLEDSGSATALDLASNKSVVINKYTKDGRVLDYNYDKLVSVAVCQLSEIFSRKGKYLLNKEDYDYKIQEVLSSLVIGSSKSEQPEEILDVDSDYMDQLKASVERVLDQYKPNRGVRSQNNDKSVNDLKIIVEDELSRRLILGELSYHLVEDFDKGLLSENFYKEVCEKAFNNKDFRTKYFYDSEAGLCPIEKMTQALATRTYMSGEYFHCFKSLLLQMDANKLSGKYSHYKSQNLNFRFDHGRLMDDSRISERESNSEALSKALSLVNCLTSALKNLCFYSQESPSSYTETGPDTGRMKFSLSYKEQVGGNRELYIGDLRTKMFTRFVEDYFESYTKQLEGSCLNNEKEFEKAILGMKLGVSLAHASYSLDHSKWGPMMCPFLFLMLYRNLSPKLKGTEVELKGCDNISTILSWHIHKLVEVPFNVVTAMMRSYIKRKLGIMKDTSQTITESLFFSEFERGVIPSHFSSVLDMGQGILHNTSDFYGLISERFINYALRLVSGNPIEAYTSSDDQISLFSHKFTELMDTDPEEFLIYLEFHNYLSSLLNKFISPKSVVGRFVAEFKSRFYVWGDEVPLLSKFVAASLHNIKCKEPHQLAETVDTIIDQAVANGVPVSVCNEVQKRTLRLLEFSKYPIDPFLLHSDSDVKDWVDGNRGYRIMRVIEQTLPEGTASVRSLLRILYNKLKSNELHEEFASAYLSQNRSETLVGLAELMGVKPPSTEDLMICWLNLTACHPLRMVLRQKVIYPSALNLEEEKVPTLIRTLQNKLSSGFTRGAQKLLSEAVNKSAFQSSIASGFVGLCKTLGSKCVRDPERESHYIKSIIQYLQTHCNVKPLNKGHLNLWVYESKTDDTQSASVKPWQIELLRPLLWDYLCIALSTSLEIGPWVLGEPVFKVKSDFWKPRPCDYFPLRPAHNRILEDRIGMNHIIHAVRRLYPEMFEKHLLPYMSDLAAMKLKWSPRIKFLDLCVTLDVNCEALSLISHVVKWKREEHYIVLSDDLLVSHDRKHTTLMDETVVSTSDVADNFLKQIYFESFVKPFVATSRTLGSFSWFPHRSSLPQGEGIERLGPFSTFIEKVVFKGIERPMYRYDLFMGYSWLDYEIELAHLNQSQLIASGLTEESCFEDVDQFWHYLSTLKVGSVKLSKTVRLTQKTQGKLQGQKFSVHLNFTGFITNSCTFVPKQLEVLYSGPVDEHFVIDCWSLLKSDREFKAGASEWFVHSDVVDAYISTASPSSEAYPLDVWLEPDLLELSVSDISKVGPEVNIVPLVVEDGHLLELKEKVAIINPVILDQDIEVFINELKEDHWDLLVCKFADILKHRQCCNLYLINVDILTIALRILNDKAEEFISKSMQEIDQWFDFKGYSLCFSKSRRQVMRHSSTGTMRLKGRLCQPAFYVEVVEEID

SEQ ID NO: 73 - protein, 481 aa, Amapari virus
  glycoprotein precursor (GPC) protein in Amapari virus(AMAV)
MGQLVSFFQDIQLFFQEALNVALAVVTVLAIIKGLVNLWKSGLFQFLFFLILAGRSCSFRIGHHTTFESVTMSVGGVFHELPALCRINNSHSLIQLSHNSSLALSVEYVDLCVVLESDQYLVAGDYSNCTGEATGYNWVIDWTLKGLGHGLEGDPKLHCQPKRSTNAEFTLQLNISRRHTNDHYRERIETGIRHMFGPFKILTKEGKDCVILRNTTWKEQCVKSHYNTLAFLLKNTANSLPKRRPLAFFSWSLSDSSGNDMPGGYCLEEWMLIAAKLKCFGNTALAKCNLNHDSEFCDMLKLYEFNKNAISKLNNQTREAVNALTHSINSLISDDLLMKNKLREFLKVPYCNYTKFWYVNHTKSGEHSLPKCWLVNNGSFLNESEFRNEWILESDHLIAEILSKEYQDRQGKTPITLVDMCFWSAIFFDNKSLLHLVGFPTHRHIVGEACPLPHKINRHGACACGLYQKLKKKTAWRKRHQ

SEQ ID NO: 74 - protein, 58 aa, Amapari virus
  GP signal peptide in AMAV
MGQLVSFFQDIQLFFQEALNVALAVVTVLAIIKGLVNLWKSGLFQFLFFLILAGRSCS

SEQ ID NO: 75 - protein, 188 aa, Amapari virus
  GP1 protein in AMAV
FRIGHHTTFESVTMSVGGVFHELPALCRINNSHSLIQLSHNSSLALSVEYVDLCVVLESDQYLVAGDYSNCTGEATGYNWVIDWTLKGLGHGLEGDPKLHCQPKRSTNAEFTLQLNISRRHTNDHYRERIETGIRHMFGPFKILTKEGKDCVILRNTTWKEQCVKSHYNTLAFLLKNTANSLPKRRPL

SEQ ID NO: 76 - protein, 235 aa, Amapari virus
  GP2 protein in AMAV
AFFSWSLSDSSGNDMPGGYCLEEWMLIAAKLKCFGNTALAKCNLNHDSEFCDMLKLYEFNKNAISKLNNQTREAVNALTHSINSLISDDLLMKNKLREFLKVPYCNYTKFWYVNHTKSGEHSLPKCWLVNNGSFLNESEFRNEWILESDHLIAEILSKEYQDRQGKTPITLVDMCFWSAIFFDNKSLLHLVGFPTHRHIVGEACPLPHKINRHGACACGLYQKLKKKTAWRKRHQ

SEQ ID NO: 77 - protein, 560 aa, Amapari virus
  NP protein in AMAV
MANSKEIPSFRWTQALRRELGSFTEPTKGSVLKDAKLIADSLDFTQVSQVQRLLRKTKRTDADLDKLRDLNKEVDKLMSMKSAQRNTVLKVGDLGKDELMDLASDLEKLKRKIGERPNGGPRLYMGNLSQSQLDKRSDILRSLGFQQQRGPNQGIVRLWDVSDPSKLNNQFGSMPALTIACMTVQGGETMNNVVQALTSLGLLYTVKYPNLDDLEKLTVEHDCLQIITRDESALNISGYNFSLSAATKAGASLIDGGNMLETIKVTPDNFSSIIMATLKVKKREGMFVDEKPGNRNPYENLLYKLCLSGEGWPYIGSRSQIVGRSWDNTSVDLNTKPTVGPRGPERNGQNMRLSNLSELQEAIVREAMQKLDPSNTIWMDIEGPPTDPVELAVLQPSTGYYIHCYRKPHDEKGFKNGSRHSHGILLKDLEDAQPGLLSYIIGLLPQNTVITVQGADDIKRLFDIHGRKDLKLVDVRLTGEQSRIFEQEVWERYGELCKAHNGVIVPKKKHKDNGPQKEPHCALLDCIMFQSVLDGHLPELSLKPLLPGSLVYQARNAFVM

SEQ ID NO: 78 - protein, 95 aa, Amapari virus
  Z protein in AMAV
MGNCNVKQETQPQSTRPKTTSTETELLRTPPVSLHGRYNCKCCWFADKNLVVCSDHYLCLRCLNLMLRTSDLCNICWKPLPTRIAIPVEPSAPPE

SEQ ID NO: 79 - protein, 2193 aa, Amapari virus
  L protein in AMAV
MDEKINSLKDFVRKQVPEIPELSYQRELLLSQVEMGMILMEGFKLLSCLVEIESCKKNSCEHNSSQKFVDVILSDNGVVTPTLPKVIPDGFRFFNKTLILLETFVRVNPEEFEKKWKRDMSKLLTLKEDVQKAGITLVPIVDGRCNYNTNLMPDWATERFRWLLIDLLRESRGDSKIDIEEQEYQRLVHSLSKTGNQSLGFENIECLKRHCLNYESRLDESLLTGFNNDLRESKIREGLIKMKNWYRKEVFVKGMGNFVKTDKAKLLQSLESLGLHANSGTSECPFCCCKILDICYKLMQKLKHGHSLSEGIPDEFIAKSQIEKEYLLVLSVCNKIKGKKVFNTRRNTLLFLDLIMLNFVIDVFENNPTELCFLKESGLIIGQMLLFSNDRVLDILSARKLLKKKLEISAHWVKKCNSILKRAEPDLWDYVSKYITEPKFDSLTSLAEELCTERPVMRYKVQIHSGDGCSHKEFETLSEQQQICLFKCLSHVSLSLTNSMKTSFSSRLLVNEVDHKKYFGTVRLKECYVQKFFLTNELYGLLFYQKTGERSRCYSLYLSDKGQLKEVGSFYCDPKRFFLPIFSDTVLLLMCAEMVSWLDFCEELAREVDPLLRLLVLSILCSPSKRNQTFLQGLRYFIMAFVNQAHHVQLMSKLVVECKSASDVLIQRLSVRMFRMVLDFGSDPDAFMSRKFKFLLNVSYLCHLVTKETPDRLTDQIKCFEKFLEPKLEFGFFVVNPSLNGTLTKEQEDAMVGGVSKFFSKDIFNIEDMKQPGVSRDLLSYCLTLFNKGKLKVNGSLKVNPFRPSFTSTALDLSSNKSVVIPKLDELGNIVSVYDKQKLVSTCVASLVERFKTKGKFNLDPNEIEFLIMDNLTNLLAIKGSAVKEREELSMLYEQLSDDAIKAFEELRQDVEFTLGRMRTPEKKKKTTNFYGNCTLESLWAPFNVMKAIRTETSIHEIRDFDPNILPPEIYEELCTSVFESSLKESFFLNEVLDICPLELLLKNLTTRCFEEQEFFDCFKYLLIHAGFDQRLGTYEHKSKSRLGLSEDVFKLRDDVRMSQRESNSEAIARRLDKSFFTSAALRNLCFYSEESPTEYTCISPNTGNLKFGLSYKEQVGSNRELYVGDLNTKMMTRLVEDFAEAVAKSMNYTCLNSEKEFEKAICDMKMAVNAGDICCSLDHSKWGPFMSPALFLSFINELKLKDHETSALIDCRPVLSVLRWHLHKAVEVPFNVAEAYCTGMLKRRLGLMSLQSQSVSEEFFHQQLLMGKEVPSHIMSVLDMGQGILHNLSDLYGLITEQFLNYCLDLLFDVVPISYTSSDDQITMIKFPTTNAPEGGESQSDWLEVLCFHDFLSSKLNKFVSPKSVCGSFAAEFKSRFFVMGEETPLLTKFVSAALHNVKCKTPTQLAETIDTICDQCVANGVGVTIVGEISKRVNRLIKYSGYPQTPFLAVEVQDVKDWVDGSRGYRLQRNVENCLSDHPQLELIRKSAKKVLTKIKRGLIFEEHLVQLIGKGGDNAMEAFLSYIDCSEIEKREALRYRWLNLSSNGDLRLVLRTKLMSARRVLEKEQIPTLIKTLQSKLSKNFSRGAKKILAESINKSAFQSSVASGFIGFCKSMGSKCVRDGSGGFLYIKDVISKVKICSCDICSLAPGIVFCDEALENVSMFSRPILWDYFSLVLTNACELGEWVFSCVQIPPKPTLLSNPNLFWAVKPRGVRLVEDQLGLNHVLQSVKRNYPKIFEEHLVPFMSDLQVSRTTDFTKLKYLDVCIALDMMNENLGIISHLLKGRDNSLYIVKQNECASAHVRQVEYVDYDVGLSPQQICSNFKIQLTFSSFINPLVMTTSTLRSFFWFGEVLRLEDENQIDVGELTDFVLLIKKYNVDRAMMLDDLTMGFVVSEIGEPKFRLLDFEWSGVEEQTSFPLSENSNNNEIKFTLNLQLEHKRLSTKYRLTRLVVYSYTMVCVMLVNDSRGVLKVENLTLRASGDVKEHRFLDGVTLVSHHPTLCGKRGINILDLFRDAELPIPETRMFPEEVFLDLSDYQSEVEDKYAYEIVGPEFSDVPLVMSGGCLVVGDKKLSHLLTELTGNVILKALGALETDGEIGSFLMGLWPYIKATKQRVKISQEEFLFIYETHRRSLLMSFEAYNDWLEFLDFSVCFSKTLGDLVVSDSSGNMRLRGVVCRPLRQVGTVMEIE

SEQ ID NO: 80 - protein, 507 aa, Flexal virus
  glycoprotein precursor (GPC) protein in Flexal virus(FELV)
MGQVVTFFQSIPEIIQEAINIALIAVSVICIIKGCVNLWKCGLIQLMVFLLLAGKRCDALNIDRRHVLSSVELNLTRMFDNFPQSCSKNNTHHYYKGPEGTNWGIELTLTNTSVANYTSMNRIRSLAFGNITNCDKTGEAGHTLKWLLNELHFNVLHVTRHVGARCMTTEGAGLLIQYNLTIGDHGGEVGRHLIASLAQIIGDNKAAWVGKCDSRCSNDGKCNYTNCEGYTHYNYLIIQNTTWAQHCTYSPLPSIRMALNKVAYSSVSRSLLGFFTWDISDSSGNHVPGGYCLEQWAVVWAGIKCFDNAVMAKCNKEHDVEFCDTMRLFDYNQNAIKTLQLNTENAVNLLKRSINGLISDSLVIRNSLKQLARIPYCNYTKFWYINDTVSGKHSLPQCWKVHNGSYLNESQFKNEWLLESDHLYSEMLLKEYEERQGRTPLALTDICFWSLVFFTSTVFLHLVGIPSHRHIVGDACPKPHRITKNALCSCGYYNLPGKQVRWVRKGK

SEQ ID NO: 81 - protein, 559 aa, Flexal virus
  NP protein in FLEV
MSDSNIPAFRWTQALRRGLSNWTQTVKADVIKDAKAIMSALDFNQVAQVQRMMRKDKRSEADLTRLRDMNKEVDALMTMRSVQRDVVLKIGGLSKDELLELSSDLEKLRKKVMRAEGSSTPGVYQGNLTTSQLQQRADLLKLVGMKPLQQSRGGVVKVWDVKDSSLMINQFGSMPALTIACMTEQGGEQMNDVVQGLTALGLVYTVKFPNLDDLEKLTEQHPCLKLITQEQSQINISGYNLSLSAAVKAGACMIDGGNMLETIKVSPSMFSTLIKTVLQVKNREGMFIGNAGPQRNPYENLLYKICLSGEGWPYIGSRSQVSGRAWDNTSIDIEGKPSPNHPPVRNGGTPQINPLSRDQEDQVKGAVRLLDPKVTTWVDIEGPPGDLVEFAIFQPNSGKYLHCYRRPHNEQSFKDQSKFSHGLLLKDLESAQPGLVSAIIRALPEGMVLTAQGSDDIEKLFLMHGRRDLKVVDVALTSEQARVYEDTVWERFNPLCKKHKGLVIKKKKKGAAPTSTNAHCALLDCIMFDATITGYIADAKPQQLLPIDLLYRTENLIHL

SEQ ID NO: 82 - protein, 95 aa, Flexal virus
  Z protein in FLEV
MGLRYSKAVRDRYGERETVGRVPMTLNLPQGLYGRFNCKSCWFANKGLIACSDHYLCLNCLTRMLSRSEFCEICNRPLPTKIIFEESPSAPPYEP

SEQ ID NO: 83 - protein, 2208 aa, Flexal virus
  L protein in FLEV
MDETLNEMRDLIRKWVPDEPEFIEQKASSLSQVHLRAVVIEGLKLLSLLVEVDSCKKNRCIHNRSKTVNAILREYKMVAPTLPDLVPDGYLVTGDIVVLLEAFVRVNQSSFEVKYNHDFGKLMMLSQDLSKVGITLVPVVDGRSNYYVDYIPDWVIERLRWLIITIMKQLKDDGEDIEEVEYERLVCSLSTMENQGLGLESLTQMRECGASYKQRLESVLSLGVNGQLSVSDCKTAILKLFTEYQTLKEQGYLAESFKSTDRLELQEALRSHSLIEHGNLGASPHCELCQNHMIEVLTKLKGSKSSSNTKLVSQEVSEYFSLLSVCNKIKGQKILNTRRLTFLSLDVIMFNKFLQIIKKDCTQDVHFLVGGCLRSVNDRLVCPDLIVKAYERKMISSPKWLTKVDQKLVHGLPEPLRQNYELQVQPLLTELDLETWAEYYDSYRENWGNKPSINYNAIATPCNCEENDRLDYVNLSDESFLQYLEALSTLSLGLVNSMKTASTTKLTVNQPDNYYGFVHCNECYYQEFQEAYRSVLLYQKTGEKNRCYSIFKTVGGGDSEEHLASFYCDPKRFFLPIMSSDVIHSMACEMLSWLDFMSDSDKRKVSCNLRKLLLCVMCTPTKRLQTYLQGMRYFIMAYVNELHHVQLLNKLKIVAKSKAEFHTMCLTDDLILSVLTSSDEVNMTKAFKFILNVSYLCHLITKETPDRLTDQIKCFEKFMEPKLNFDSVLINPSMSLHLEPKQEDKFLNDMTRLLSKDVKGAQGSDPGTDPLLMSICSSLFNHGELGLPNKLSRDPQSPSFTSTALDLSSNKSVVVPKLNELGEPITTYDYQTLVSSVVVELSESFKNKLQYKLDRKSLVYKIYDRLMGLVSNKVKHPIDEPFDSEDDILDSVSDEVKDVILKIESDVTSCLSRMESSKCNHGCEKKVGTGKADHNPLDSLWSEEVRMRVNIETSHHEVKDFDFNTFPPETYEELVQIVFESRFKELYFTERVFSPCPLEMLLRNLTRKYYEEQDFFECFKYILVSTGYDNRVGRYDHKKINRLGFKEPALNISEVVRISTRESNSESILKRLDKSFFTNSSLRNLCFYSDESATERSCVGTNIGRLKFGLSYKEQVGGNRELYVGDLNTKLTTRLIEDYFESIVGDMRYSCLNNEKEFEKALLDMKAIIRQSGFVVSMDHSKWGPHMSPVIFSQFLRLLKLSLLDGSVIDNRPILELLNWHIHKMVEVPFNVVRAYMKGYIKRCTGVMEKNSMTMVEDFMHKQFETGVVPSHISSVIDMGQGILHNVSDFYGLVTEQFINYCIKLCYDTPCLSYTSSDDEILMSSSFILKKNDGELDVELAKDILDFHDFLSRGLNKFVSPKTVAGTFACEFKSRFFIWSQEVPLLTKFVAAALHNVKAKAPNQLAETIDTILDQCVANGVSIEVVGRIAKRTNALLRYSGHPYNLFLCLEETDVKDWVDGSRGYRLQRSVENVFPDDEVPGIVRAAARKVFHLIRSGTIEEEYLVSTIQTDPDDCLRRILEIADVTNEQIERILDFRWLNLRAHGDYRMVLRTKLMNSARIIEREEIPSLIKSVQSKLSKNFVRGAKKIITDAVNKSAFQSCIASGFVGVCKSMGSKCVRDGKGSFLYIKDVLKDIIKHVNCHSCRNYCNIYCREALKEVSEYSRPLFWDYFALVLTNACELGNWVFSKAVLPKSVYKLDNPSQFWLCKPSSHTELEDKVNLNHVLFSIKRNFPSLFEEHVAPYLSDLNTLKISWVQRIKFLDICVAVDMTSESLGIISHMIKRKREELYVVKQNEQSMSHLREASTFEEGLQLNSYEICYNFLLQILFESMLTPVLLTTSQLKKYFWYGEVELLPNTEPHELQQLTQFVMDCKMLNISKAMTIDDLDLGFVQSTMKMTDVNLNLSTFLTKVDWANRYLYETFESMFIESPDSEFSMELVLVFSHIRKSYKHKYEHTTTYTVKASFVLETSLFSDQDDQDVLVIPVKDVECFVSNSPGNHLQLDGAGLIPLVPVVSGKEVLNFDLLLKDQDVSFSGTSPHLSKVRLDFSAHIKELKNKFSYKIIGPEMGFTPLHLDKGIIKEGDRIVSKLNVNVTSKSLFMALGLLSNDKVSEFLESLFYYLKSSGKTGALLSMTTSDLQNLVDNYNEDFKQILKRESDWVSFGAFKLAYSNSLSAIMIQDERGPYRLKGLSCEKLLKSHDERVEID

SEQ ID NO: 84 - protein, 479 aa, Guanarito virus
  glycoprotein precursor (GPC) protein in Guanarito virus(GTOV)
MGQLISFFQDIPIFFEEALNVALAVVTLLAIIKGIVNVWKSGILQLFVFLVLAGRSCSFKVGHHTNFESFTVKLGGVFHELPSLCRVNNSYSLIRLSHNSNQALSVEYVDVHPVLCSSSPTILDNYTQCIKGSPEFDWILGWTIKGLGHDFLRDPRICCEPKKTTNAEFTFQLNLTDSPETHHYRSKIEVGIRHLFGNYITNDSYSKMSVVMRNTTWEGQCSNSHVNTLRFLVKNAGYLVGRKPLAFFSWSLSDPKGNDMPGGYCLERWMLVAGDLKCFGNTAVAKCNLNHDSEFCDMLRLFDFNKNAIEKLNNQTKTAVNMLTHSINSLISDNLLMRNKLKEILKVPYCNYTRFWYINHTKSGEHSLPRCWLVSNGSYLNESDFRNEWILESDHLIAEMLSKEYQDRQGKTPLTLVDLCFWSAIFFTTSLFLHLVGFPTHRHIQGDPCPLPHRLDRNGACRCGRFQKLGKQVTWKRKH

SEQ ID NO: 85 - protein, 58 aa, Guanarito virus
  GP signal peptide in GTOV
MGQLISFFQDIPIFFEEALNVALAVVTLLAIIKGIVNVWKSGILQLFVFLVLAGRSCS

SEQ ID NO: 86 - protein, 187 aa, Guanarito virus
  GP1 protein in GTOV
FKVGHHTNFESFTVKLGGVFHELPSLCRVNNSYSLIRLSHNSNQALSVEYVDVHPVLCSSSPTILDNYTQCIKGSPEFDWILGWTIKGLGHDFLRDPRICCEPKKTTNAEFTFQLNLTDSPETHHYRSKIEVGIRHLFGNYITNDSYSKMSVVMRNTTWEGQCSNSHVNTLRFLVKNAGYLVGRKPL

SEQ ID NO: 87 - protein, 234 aa, Guanarito virus
  GP2 protein in GTOV
AFFSWSLSDPKGNDMPGGYCLERWMLVAGDLKCFGNTAVAKCNLNHDSEFCDMLRLFDFNKNAIEKLNNQTKTAVNMLTHSINSLISDNLLMRNKLKEILKVPYCNYTRFWYINHTKSGEHSLPRCWLVSNGSYLNESDFRNEWILESDHLIAEMLSKEYQDRQGKTPLTLVDLCFWSAIFFTTSLFLHLVGFPTHRHIQGDPCPLPHRLDRNGACRCGRFQKLGKQVTWKRKH

SEQ ID NO: 88 - protein, 560 aa, Guanarito virus
  NP protein in GTOV
MAHSKEIPSFRWTQSLRRELGMFTEPTKSSVLNDAKLIADSLDFTQVSQVQRLLRKSKRGDTDLDKLRDLNKEVDRLMSMKSVQNNTVLKVGDLGKDELMDLASDLEKLKKKIGDRESNSPRMYMGNLTQSQLEKRAGILRTLGFQQQRGAAGGVVRLWDVSDPSKLNNQFGSMPALTIACMTVQGGETMNNVVQALTSLGLLYTVKYPNLDDLEKLTLEHDCLQIITKDESALNISGYNFSLSAAVKAGASLIDGGNMLETIKVTPNNFSSIVKAALNVKRREGMFIDERPGNRNPYENLLYKLCLSGEGWPYIGSRSQILGRSWDNTSVDLNARPVTGPRAPEKNGQNIRLSNLSEMQEAIVKEAMRKLDSSDTIWMDIEGPPTDPVELAVFQPSSGNYVHCFRKPHDEKGFKNGSRHSHGILLKDLEDAQPGLLSYVIGLLPQGSVITVQGADDIKKLFDIHGRKDLKLVDVRLTGEQSRIFEQEVWEKFGHLCRAHNGVIVPKKKNKEANSTKEPHCALLDCIMFQSVLDGHLPDTIPIQLLPNTLVFQAKSAFVM

SEQ ID NO: 89 - protein, 95 aa, Guanarito virus
  Z protein in GTOV
MGNSKSKSNPSSSSESQKGAPTVTEFRRTAIHSLYGRYNCKCCWFADKNLIKCSDHYLCLRCLNVMLKNSDLCNICWEQLPTCITVPEEPSAPPE

SEQ ID NO: 90 - protein, 2198 aa, Guanarito virus
  L protein in GTOV
MDEKVFVLKDFIRRQVPDIPELSYQKEALLSQVEVPMVLTEGFKLLSCLVEIESCRKNSCECNFEQKFVDTILSENGVVAPTLPKVIPDGYRFFNKTLILLETFVRVNPEEFEKKWKTDMAKLLSLKEDIHRTGITLVPVVDGRGNYNTDLLPDWATERFRWLLIDLLRESRGAPTMEIEDQEYHRLIHSLSKTSNQSLGFENIECLKRVHLNYEERLNEQLLKDIVGEVRESKIREELIKLKTWYREEIYRKGLGNFVQTDRKSLLQTLVLSSAHSDSLAPECPMCCSKILDLCYQLSMRIANQTSLENNFDEPPLPTTQIEKVYLSLLSACNKIKGKKVFNTRRNTLLFLDLIILNFVAHVYKTQPSEMETLKKAGLIIGEMLLLPNDRVLDILVARRLLLKKVESCCNWLDRCRHLLRKEEPVLWDCVSEFTNVPDFELLLSLAEELCSEKPVMHYKPPSSLIGDCAHKDLMSMSDGEFESLFKCLSHISLSLVNSMKTSFSSRLLVNEKDYKRYYGTVRLKECYVQRFFLRVGLYGLLFYQKTGEKSRCYSLYLSDKGNLVELGSFYSDPKRFFLPIFSEFVLLATCAEMLSWLDFDEKLVDAVTPLLKILVLSILSSPTKRSQTFLQGLRYFIMAYVNQAHHIQLMSKLAVECKSASDVLIQRLSVKIVDMVLSDGSDPDMHMTRKFKFVLNVSYLCHLITKETPDRLTDQIKCFEKFMEPKLEFGSLIVNPSLNGFLSKEQEDVMIEGVEKFFSKELLTVEDLKRPGVSRELLSYCVSLFNKGRLRVNGTLGTDPYRPSFTSTALDLSSNKSVVIPKLNEVGEIVSEYDKQKLVSTCITSMAERFKTKGRYNLDPDTIDFLIMRNLTNLLSARKLDSSKKEELSLLYEHLSEDVMKAFEEIKYEVEITLSKMRLSRELECGHKKPCTLEGVWAPFNVLKVIRSETSVHEIRDFDPDLLGEDVYEKLCVAVYDSPLRPTFFLEKPLDICPLELLLKNLTTKSYEDDEFFDCFKYILIQAGFDQRLGAYEHKNRSRLGLSEEAFRLKEDVRVSNRQSNSEAIADRLDKSFFTSAALRNLCFYSEESPTEYTCISPNVGNLKFGLSYKEQVGSNRELYVGDLNTKMMTRLVEDFTEAVANSMNYTCLNSEKEFERAICDMKMAVNNGDLCCSLDHSKWGPFMSPALFHAFFGALKFKISKTGEQVDLGPVLNVLKWHLHKAVEVPISVAEAYCTGMLKRRLGLMSLSCQSVCEEFFHQKLLLEEGVPSHIMSVLDMGQGILHNSSDLYGLITEQFINYCLDFLFDVIPVSYTSSDDQITTFKLPTMSSSEDGLDGFDWLELLCFHDFLSSKFNKFVSPKSVSGTFVAEFKSRFFVMGEETPLLTKFVSAALHNVKCKTPTQLAETIDTICDQCVANGVGIEIVTKISERVNRLIRYSGYPQTPFLAVEKQDVKDWTDGSRGYRLQRNIEHYLQGSEQLEFVRKCAKKVLLKIKKGQVFEEYLVQLIGKDGDDALKGFLSYAGCESDEIKDVLKYRWLNLSANGDLRLVLRTKLMSTRRVLEREQIPTLIKTLQSKLSKNFTKGVKKILAESINKSAFQSSVASGFIGFCKSMGSKCVRDGSGGFMYIREVLNKQRVCPCEICAQNPGIIFCSDALTLIPEFSRSILWDYFSLVLTNACELGEWVFSSVQPPKVPILLNNPNLFWAVKPRGTRLIEDQLGLGHVLQSVRRSYPKVFEEHLVPFMNDLQVSRTTDFTRLRYLDVCVALDMMNENLGIVSHLLKAKDNSIYIVKQSECAVAHIRQVEYVNQELGLSPQQICSNFKIQLVFSSMINPLVITTSVLKSFFWFNEVLNLEDESQIDVGELTDFTILIKKYNLNRAMMLDDLTMGYVVSTISEPTIHLVSLKRNSNSIVGEQNSEMLHGEQVEDMYSIVLHIQLEHKRHSTKYHLSRTVVYSYTVECETNITDIEKEPSLATVKNVVLRASGSIEGHQFLDGVNLVASQPIFTGKKVINLSELLADSEITETYKEGDAVGSILLNFGTFYEHIDDRYAYEIVGPECSDSPLVLDGGSILADGKKLSSIKVELTGDVILKALGALESEKEVQSLLTGLWPFIRINNLKVKMAQEDFLLMYEMHRESLLKSLEVFSEWCEFVDFSVCYSKSLRDLVISDSSGSLRLKGITCKPINLSNSVTEIE

SEQ ID NO: 91 - protein, 515 aa, Latino virus
  glycoprotein precursor (GPC) protein in Latino virus(LATV)
MGQVIGFFQSLPEIINEALNIALICVALLATIKGMVNIWKSGLIQLLFFLTLAGRSCSHSFTIGRFHEFQSVTVNFTQFMSYAPSSCSVNNTHHYFKGPQNTTWGLELTLTNESMINITNSMRVFTNIHHNVTNCVQNISEHEGVLKWLLETMHLSISKPGKHIAPVMCERQKGLLIEYNLTMTKDHHPNYWNQVLYGLAKLLGSSKRLWFGACNKADCQMQSDHQHIKCNYSNCKGYTSFKYLIIQNTTWENHCEYNHLNTIHLLMSSIGQSFITRRLQAFLTWTLSDALGNDLPGGYCLEQWAVVWFGIKCFDNTAMAKCNQNHDSEFCDMLRLFDYNRNAIQSLNDQSQARLNLLTNTINSLVSDNLLMKNKLRELMNVPYCNYTRFWFINDTKNGRHTLPQCWLVSDGSYLNETRFRTQWLSESNSLYTEMLTEEYEKRQGRTPLSLVDLCFWSTLFYISTLFAHLVGFPTHRHLIGEGCPKPHRLTGSGICSCGHYGIPGKPVRWTKMSR

SEQ ID NO: 92 - protein, 58 aa, Latino virus
  GP signal peptide in LATV
MGQVIGFFQSLPEIINEALNIALICVALLATIKGMVNIWKSGLIQLLFFLTLAGRSCS

SEQ ID NO: 93 - protein, 222 aa, Latino virus
  GP1 protein in LATV
HSFTIGRFHEFQSVTVNFTQFMSYAPSSCSVNNTHHYFKGPQNTTWGLELTLTNESMINITNSMRVFTNIHHNVTNCVQNISEHEGVLKWLLETMHLSISKPGKHIAPVMCERQKGLLIEYNLTMTKDHHPNYWNQVLYGLAKLLGSSKRLWFGACNKADCQMQSDHQHIKCNYSNCKGYTSFKYLIIQNTTWENHCEYNHLNTIHLLMSSIGQSFITRRLQ

SEQ ID NO: 94 - protein, 235 aa, Latino virus
  GP2 protein in LATV
AFLTWTLSDALGNDLPGGYCLEQWAVVWFGIKCFDNTAMAKCNQNHDSEFCDMLRLFDYNRNAIQSLNDQSQARLNLLTNTINSLVSDNLLMKNKLRELMNVPYCNYTRFWFINDTKNGRHTLPQCWLVSDGSYLNETRFRTQWLSESNSLYTEMLTEEYEKRQGRTPLSLVDLCFWSTLFYISTLFAHLVGFPTHRHLIGEGCPKPHRLTGSGICSCGHYGIPGKPVRWTKMSR

SEQ ID NO: 95 - protein, 557 aa, Latino virus
  NP protein in LATV
MSGASEVPSFRWTQSLRRGLSHFTTSAKGDVLRDAKSLVDGLDFNQVSQVQRVMRKDKRSDDDLSKLRDLNRSVDSLMVMKNKQNNVSLKIGSLSKDELMDLATDLEKLKRKINLGDRQGPGVYQGNLTSAQLEKRSEILKSLGFQPRANQNGVVKVWDIKNPKLLINQFGSIPALTIACMSVQGAEQMNDVVQGLTSLGLLYTVKYPNLDDLNKLSKDHPCLEFITKEESANNISGYNLSLSAAVKAGACLVDGGNMLETILVKPDNFQDIVKSLLVIKRQEKMFVNEKPGLRNPYENILYKLCLSGEGWPYIGSRSQIVGRAWENTTVDLSKEVVYGPSAPVKNGGNMRLSPLSDTQEAVIKEAIGKLDMDETIWIDIEGPPNDPVELAIYQPSTGNYIHCFRVPHDEKGFKNGSKYSHGILLRDIENARSGLLSRILMRLPQKVVFTCQGSDDIQKLLQMNGRPDIATIDMSFSSEQARFFEGVVWEKFGHLCTRHNGVVLSRKKKGGNSGEPHCALLDCIIFQAAFEGQVTGQIPKPLLPNSLIFKDEPRVAM

SEQ ID NO: 96 - protein, 91 aa, Latino virus
  Z protein in LATV
MGSKQSAPPKPLQLPQPRVSLLREAKPSLYGRYNCKCCWFQDKNLVECSDHYLCLKCISSMLKRGKNCEICGKAIPTYIEVGITPTAPQLN

SEQ ID NO: 97 - protein, 2238 aa, Latino virus
  L protein in LATV
MDDIVNQLFDLLRKHFPARPKVTEQITLVTCQNDAKMILTEGFKLLSLLVELDSAEANNCTHNSDSLTIEGILRKEGIMSIALPRIVPDGFSLYGNVLILLETFVRVNPVSFEQKYNQDMSKLLSLKDDLSLCGITLVPLVDGRTNYYNRFVDDWVIERFRWLLLQLIKFVRESGEEIEELEYQRLITSLSKLENQSLGFENIEKLPQTGLKYRDELKKHMFGNLSSKMKESEIQENLINVLKEFFIKEYKNNKSLHKFVFTNRDGLLAKLDQITHHSEHPVDCMSCSSKLYSIIDKLGTLKRQPLHSDYHPIYAKMWHSDSLSQAEQIYLKLLSQCNKIKSAKLLNTRRNTLLFLDLIMVNFIVHSWKQNPEVLTEYRRCGLMAGQLALFSNDRYFDLNELRNKLINKLKNCENWIAKCVHQLKKQEFVALDDVLVWATVPDFESLELITTSLELKRFKLQYGKDKVDHNEHPIGPLSEETFFRNLNVLSSVCLALVNSMKTSFTSKTVINERRASNHFGEVDLIECYCQRFFLSKDLVGILSYQKTGEKSRCYSISLISNGELEYIGSFYCDPKRFFLPIFSQIVLLNMSREMMLWLADLNLNDSLVGDKLRKLILLIVTNPSKRNQTFLQGLRYFIMAYVNQFHHVELMDRLIVPVKSYCESCLQRISFDIFRLILEGDYDNEHMTRKFKFLLNVSYLCHLITKETPDRLTDQIKCFEKFMEPKLKFESVIVNPSLTENMTEDEEAQVLKGVDKLLGKSLSCSTDLTSPGVSKTLLSMCVSSFNRGLLNVNGHLRQDPYRPNFTSTALDLSSNKSVVVPKLDELGNPISRYDYELLVSSCVTNLAEGFKTKGKFKLDINCQEYTIMRNLTNLVLKNEDKSDAKIKGEKPCSFELSQWMETLSEEQLEVLEKLKGDVNIALGKLKEKGRSKSNSTLKEGVKRLDSGNTLAGCADPQQVLVNLWSEFGVMKQILVEVSLHEIKDFDPDIIPPQMIQKLVFKVNNSNYKSLFFLDSVINPCPLELLIKNMTTATFDDGELFECFKYLLITAGFDQKLGTYEHKNRSRFGFKFEALKVREEGRMSSRESNSEAIARRLDKSVFTNSALRNLCFYSDESPISYSHVSPDVGKLKFGLSYKEQVGSNRELYVGDLNTKLMTRLIEDFSESVVSNMSYSCLNNEAEFEKAITDMKMCVNLGDMSLSLDHSKWGPHMSPVIFAAFLQGLDLKYGPSLCKLNTDPIITLLSWHIHKVVEVPYNVIHAYVTGMIKRQLGLMNMSGSTITESFVHRLLKEKREPLSHVMSVIDMGQGILHNMSDLYGLVTEQFINYAIHFLFDMNTTSYTSSDDQISMIKIGSGMCNFESLKVIEEWETILNFHAFISTKFNKFVSPKTVAGTFAAEFKSRFFVWGEEVPLLTKFVSAALHNVKCKTPVQLSETVDTICDQCVANGVSVEIVSYICNRTNRLIRYSGFGEHPFLNVENLDVKDWVDGSRGYRLQRNIELHLESDGCTSFIRQAARKVFSNIKSGKIVEQALVDLVQEDGDKAITGFLRSVGVSEEDIALLCRIRWINLCAHGDLRLVLRTKLMSSRRIIETEEIPSLIKSIQSKLSKNFVKGAKKILAESINKSAFQSSIASGFIGFCQSVGSKCVRTGEGGFYYIKELKSKVDLYCPCEVCARWKGVTYCSSSCLKIESFTRPLMWDYFSLVLSNACELGEWVFEDVEYPKDINFLRNPNLFWLVKPRVSCQIEEKLGLTHILQSIRRNYPQLFETHLSPFMSDFQAGRTLGTMTVKFLDVCVALDLANENLGIVKHFLKNRRHDIYIVKQDESSQSHIRCQKSICVDVELTSTQVCQNFMTQLIMSSLVQPLVLTSSELKKFNWFQQVLTLETDEDVDLGLLTDFALQVKKFNVDRAMHSEDLSAGYISSTVSVTTFSLSKPIFLQQIDSDFIGGTEDRKDFIQMIKSEFTKNSIDLQFVIQISHVKRALRFNLKRTTVYTLIVRTSILKEVILNSLGQEDQSVELVVDDLELFCSGHDGNHFTLDAAPLIVQEPLINGNLKFDLVSRLEEEDLTFSYSESLPSFHFNFEKYKHELCNKFSYHLSGPVIVDEPLVLDRGVILHGGRKLTTLQFDFSADRIMQALSELESLSSRDLFLFNLWVYSDQTKSKLYIHQDKLLLLVESYLSELNSSLARYDSWLNLGNYMICYSKSFKCLMISDTNGRNRLKGILCRRLIEEEVQDIE

SEQ ID NO: 98 - protein, 496 aa, Machupo virus
  glycoprotein precursor (GPC) protein in Machupo virus(MACV)
MGQLISFFQEIPVFLQEALNIALVAVSLIAVIKGIINLYKSGLFQFIFFLLLAGRSCSDGTFKIGLHTEFQSVTLTMQRLLANHSNELPSLCMLNNSFYYMRGGVNTFLIRVSDISVLMKEYDVSIYEPEDLGNCLNKSDSSWAIHWFSNALGHDWLMDPPMLCRNKTKKEGSNIQFNISKADDARVYGKKIRNGMRHLFRGFHDPCEEGKVCYLTINQCGDPSSFDYCGVNHLSKCQFDHVNTLHFLVRSKTHLNFERSLKAFFSWSLTDSSGKDMPGGYCLEEWMLIAAKMKCFGNTAVAKCNQNHDSEFCDMLRLFDYNKNAIKTLNDESKKEINLLSQTVNALISDNLLMKNKIKELMSIPYCNYTKFWYVNHTLTGQHTLPRCWLIRNGSYLNTSEFRNDWILESDHLISEMLSKEYAERQGKTPITLVDICFWSTIFFTASLFLHLVGIPTHRHLKGEACPLPHKLDSFGGCRCGKYPRLKKPTIWHKRH

SEQ ID NO: 99 - protein, 58 aa, Machupo virus
  GP signal peptide in MACV
MGQLISFFQEIPVFLQEALNIALVAVSLIAVIKGIINLYKSGLFQFIFFLLLAGRSCS

SEQ ID NO: 100 - protein, 204 aa, Machupo virus
  GP1 protein in MACV
DGTFKIGLHTEFQSVTLTMQRLLANHSNELPSLCMLNNSFYYMRGGVNTFLIRVSDISVLMKEYDVSIYEPEDLGNCLNKSDSSWAIHWFSNALGHDWLMDPPMLCRNKTKKEGSNIQFNISKADDARVYGKKIRNGMRHLFRGFHDPCEEGKVCYLTINQCGDPSSFDYCGVNHLSKCQFDHVNTLHFLVRSKTHLNFERSLK

SEQ ID NO: 101 - protein, 234 aa, Machupo virus
  GP2 protein in MACV
AFFSWSLTDSSGKDMPGGYCLEEWMLIAAKMKCFGNTAVAKCNQNHDSEFCDMLRLFDYNKNAIKTLNDESKKEINLLSQTVNALISDNLLMKNKIKELMSIPYCNYTKFWYVNHTLTGQHTLPRCWLIRNGSYLNTSEFRNDWILESDHLISEMLSKEYAERQGKTPITLVDICFWSTIFFTASLFLHLVGIPTHRHLKGEACPLPHKLDSFGGCRCGKYPRLKKPTIWHKRH

SEQ ID NO: 102 - protein, 564 aa, Machupo virus
  NP protein in MACV
MAHSKEIPSFRWTQSLRRGLSQFTHTVKTDVLKDAKLIADSIDFNQVSQVQRALRKNKRGEEDLNKLRDLNKEVDRLMSMKSIQKNTIFKIGDLGRDELMELASDLEKLKNKIKRTESGPQGLYMGNLSQLQLTKRSEILKTLGFQQQRGAGNGVVRIWDVSDPSKLNNQFGSMPALTIACMTVQGGETMNSVVQALTSLGLLYTVKYPNLNDLDKLTLEHECLQIVTKDESSINISGYNFSLSAAVKAGASILDGGNMLETIRVTPDNFSSLIKSTLQVKRKEGMFIDEKPGNRNPYENLLYKLCLSGDGWPYIGSRSQILGRSWDNTSVDLTKKPQVGPRQPEKNGQNLRLANLTEMQEAVIKEAVKKLDPTNTLWLDIEGPPTDPVELALYQPANKHYIHCFRKPHDEKGFKNGSRHSHGILMQDIEDAMPGVLSYVIGLLPQDMVITTQGSDDIRKLLDIHGRKDLKLVDVKLTSDQARLYDQQIWEKFGHLCKHHNGVVVNKKKREKDSPFKLSSGEPHCALLDCIMYQSVMDGKMVDEEPVALLPLSLLFLPKAAFAL

SEQ ID NO: 103 - protein, 94 aa, Machupo virus
  Z protein in MACV
MGNCNKPPKRPPNTQTSSNQPSAEFRRTAPPSLYGRYNCKCCWFADTNLITCNDHYLCLRCHQTMLRNSELCHICWKPLPTSITVPVEPSAPPP

SEQ ID NO: 104 - protein, 2209 aa, Machupo virus
  L protein in MACV
MDEYVQELKGLIRKHIPERCEFGHQKVTFLSQVHPSPLLTEGFKLLSSLVELESCEAHACQANTDQRFVDVILSDNGILCPTLPKVIPDGFKLTGKTLILLETFVRVNPDEFEKKWKADMSKLLNLKHDLQKSGVTLVPIVDGRSNYNNRFVADWVIERIRWLLIGILKASKSMLEIDIEDQEYQRLIHSLSNVKNQSLGLENLEHLKRNSLDYDERLNESLFIGLKGDIRESTVREELIKLKLWFKDEVFSKGLGKFKLTDRRELLESLSSLGAHLDSDVSSCPFCNNKLMEIVYNVTFSCVERTDGVATVDQQFSTTHSNIEKHYLSVLSLCNKIKGLKVFNTRRNTLLFLDLIMVNLMVDISDSCQDAIESLRKSGLIVGQMVMLVNDRVLDILEAVKLIRKKIGTNPNWVKNCSKILERSHPEIWHHLSTLIKQPDFNSLISIAQHLVSDRPIMRYSVERGSDKICRHKLFQEMSSFEQMRLFKTLSSISLSLINSMKTSFSSRLLVNEREFSKYFGNVRLRECYAQRFYLAESLVGFLFYQKTGERSRCYSVYLSDNGVMSEQGSFYCDPKRFFLPVFSDEVLAGMCEEMTSWLDFDTGLMNDTGPILRLLVLAILCSPSKRNQTFLQGLRYFLMAFANQIHHIDLTSKLVVECKSSSEVVVQRLAVGLFIRLLSGESDASLFFSRRFKYLLNVSYLCHLITKETPDRLTDQMKCFEKFIEPKVKFGCAVVNPSLNGKLTVDQEDIMINGLKKFFSKSLRDTEDVQTPGVCKELLNYCVSLFNRGKLKVSGELKNNPFRPNITSTALDLSSNKSVVIPKLDELGNILSTYDKEKLVSACVSSMAERFKTKGRYNLDPDSTDYLILKNLTGLVSAGPKAKSTQEELSLMYEALTEEQVESFNEIKHDVQVALAKMADNSVNTRTKNLGRADNSVKNGNNPLDNLWSPFGVMKEIRAEVSLHEVKDFDPDVLPPEVYKELCDAVYKSSEKCNFFLEGVLDVCPLGLLLKNLTTSSYVDEEYFMCFKYLLIQGHFDQKLGSYEHKSRSRLGFTDETLRLKDEVRLSIRESNSEAIADKLDKSYFTNAALRNLCFYSEDSPTEFTSISSNSGNLKFGLSYKEQVGSNRELYVGDLNTKLMTRLVEDFSEAVGNSMKYTCLNSEKEFERAICDMKMAVNNGDLSCSYDHSKWGPTMSPALFLALLQMLELRTPVDRSKIDLDSVKSILKWHLHKVVEVPINVAEAYCIGKLKRSLGLMGCGSTSLSEEFFHQTMQLNGQIPSHIMSVLDMGQGILHNTSDLYGLITEQFLCYALDLLYDVIPVSYTSSDDQITLIKTPSLDIEGGSDAAEWLEMICFHEFLSSKLNKFVSPKSVIGTFVAEFKSRFFVMGEETPLLTKFVAAALHNVKCKTPTQLSETIDTICDQCIANGVSTKIVTRISKRVNQLIRYSGYGETPFGAIEDQDVKDWVDGSRGYRLQRKIEAIFHDDKETSFIRNCARKVFNDIKRGRIFEENLINLIGRGGDEALTGFLQYAGCSEQEVNRVLNYRWVNLSSFGDLRLVLRTKLMTSRRVLEREEVPTLIKTLQSKLSRNFTKGVKKILAESINKSAFQSSVASGFIGFCKSMGSKCVRDGKGGFLYIKEVYSGVSACTCEICALKPKIIYCNNSLNKVSQFSKPILWDYFSLVLTNACELGEWVFSTVKEPQKPLVLNNQNFFWAVKPKVVRQIEDQLGMNHVLQSIRRNYPVLFDEHLTPFMNDLQVSRTMDSGRLKFLDVCIALDMMNENLGIISHLLKTRDNSVYIVKQSDCALAHIRQSSYTDWELGLSPQQICTNFKTQLVLSSMVNPLVLSTSCLKSFFWFNEVLELEDDSQIELAELTDFALMVKNQNVSRAMFVEDIAMGYVVSNFEGVRISLSNVMVDGVQLPPQEKAPDIGELFGLKAENVIVGLVVQIDHVRMSTKFKLKRKMVYSFSLECIMDVGEIQNKEVILKVVAVDQSVSGSGGNHMLLDGVSVVASLPLFTGQASFDLAAMLIESNLAGSNDNFLMRNVTLDLGGFSPELSDKYSYRLSGPENQEDPLVLKDGAFYVGGERLSTYKVEFTGDLVVKALGALEDDESVVSMLHQLWPYLKATSQVILFQQEDFTIVHDLYKKQLTKSIESFGEWIEFTNFKVAYSKSLKELVISDTQGSFRLKGVMCRPLASTPQVEDIE

SEQ ID NO: 105 - protein, 507 aa, Parana virus
  glycoprotein precursor (GPC) protein in Parana virus(PARV)
MGQLVTLFQSIPEIIEEAVNIALIAVAIMCIVKGTVNLWKCGIVQLCIFLLLAGKRCDGFQIDRRHKLESVEFNLTRMFNNLPMSCSKNNTHHYYKGPEGTNWGIELTLTNESVANYSNMSAIRSLAYGNITNCDKTNEAGHTLKWLLNELHFNVLHVTRHIGARCLTTDSAGILIQYNLTVGDYGGEVGRHLIASLAQIIGDDKAAWVGKCFNNCSANGTCRLTNCEGYTHYNYLIIQNTTWENHCSYSPMSTIRMALNKVAYSSVSRKLLGFFTWDISDSSGRHVPGGYCLEQWALVWAGIKCFDNSVMAKCNKDHNEEFCDTMRLFDFNQNAIKTLQLNTENSINLLKRSINGLISDSLVIRNSLKQLARIPYCNYTKFWYVNDTITKRHSLPQCWLTYNGSYLNETHFRNDWLLESQQLYNDMLVKEYEERQGKTPIALTDICFWSLVYFTVSVFLQLVGIPSHRHIVGQGCPKPHRISRNGLCSCGYYNIPMKPVRWVRKGK

SEQ ID NO: 106 - protein, 559 aa, Parana virus
  nucleoprotein (NP) protein in PARV
MSEKQVPSFRWTQALRRGLSNWTEPVKVDVIKDARAIISALDFNQVAQVQRIMRKEKRTDSDLTRLRDMNKEVDALMSMRSTQHNVVLRAGGLSKDELLELSADLEKLRKKVIRAEGGNPGVYQGNLTATQLNQRAELMKLVGMGPGLRSGNGVVRVWDVKDSSLMINQFGSMPALTIACMTEQGGETMNDVVQGLSALGLVYTVKFPNLDDLEKLSEQHPCLKSITQEQSQINISGYNLSLSAAVKAGACMIDGGNMLETIKMSPPMFSSIIKAVLQVKNREQMFVGSVGVQRNPYENLLYKLCLSGEGWPYIGSRSQIVGRAWDNTLIDLEGKPAVSPPPVKNGGPINLSPLSKGQEDLINQAVQKLSPKETTWIDIEGPAGDPVELAIYQPESGNYLHCYRAPHNESAFKDQSRYSHGLLLKDLKAARPGLISAIIKALPKGMVLTAQGSDDIEQLILMHGRRDIKVVDVKLTSEHARVFEDPVWDRFNPLCEKHTGLVIKKKKKGAPPSSTNPHCALMDCIMFDATVTGYIRDVKPRQLIPIDLLFKDDLNLINL

SEQ ID NO: 107 - protein, 95 aa, Parana virus
  Z protein in PARV
MGLRYSKAVKDKYGDREIEGRATMTLNLPQGLYGRFNCKRCWFATKGLIACSDHYLCLNCLTIMLSDGNFCEVCGKTLPKKIVFEESPSAPPYDG

SEQ ID NO: 108 - protein, 2202 aa, Parana virus
  L protein in PARV
MTEIISELKDLIRKWVPDEEHYIEQKSLTLSQVHTRAVVIEGLKLLSLIVEVDSCLKHKCIPNRNKTVNMILKDHKLVGPTLPECTPDGYYLCGDVLILLEVFVRSNQSAFEKKYAADFEKLMSLAKDLTSYGITLVPVIDGRSNYYVEAIPDWVIERLRWLLLKVMDSLKDEGEDIEETEYSRLIHSLSTMENQNLGLESISQLKQTGLTYKKKLQALFTKNIRPNMSLGECRLKLIEIFNEFRLRLESGTVERAYTQTNQDFLLNKLKEHSLLKVSRVSKFDSKGDCHLCSNHLIKVLGLLKRQTTDEKEAPRIGMIRREYGLILSTCNKIKGQKILNTRRNTLLSLDVVMFNAFLSLLRTYGEIVFDLMVGGCLQSVNDRLVSPSLIIDLYNKKCTRNPQWLSKVMLKLNLLPGYIQEDFKVFVRPHLVELDLDLWSNYLELYSTTFERRLEIQYTVSEEEVHEKTDPEVIEWLEMKESTFKQYLDSLSTLSLGLVNSMKTSGTSRFHINQPNDYYGTVKCEECFFQSLHHAYGVSLLYQKTGERNRCYSLCSNSGKVGHIVSFYCDPKRFFLPIMSQQVLLSMTQEMLSWLDFIKGDDLNLISSMLRRLILSVLACPSKRVQLYLQGLRYFLMAYVNEIHHVQLLAKLEVEVKSRSEWATMTLADDLVVALLNMSNQPNMSKTFKFLLNVSYLCHLITKETPDRLTDQIKCFEKFMEPKIDFGSVIVNSSLNGNMTEEEESKILLDIDRLLSKQLNTSDQISKPGVNPTVMSLCCSLFNLGELDVNGKLKRDPQSPSFTSTALDMSSNKSVVVPKLDELGNPLSTYDYAAVVSSVIVDLSEGFKNKLRYKLDPHTLKYKIYKRFLSLVSDKTPKENKLEMSQDEFLDEITDEQLEMIEKIEMEVNECLSKAANVEPRIGTGPDDKNPLKSLWAKEILCVIESETSKHEVKDFDYTLFHHETYKELVELVFNSNSRNQYFTDRILNPCPLEYLMKNLCRKYYEEEDYFECFKYILVSTGFDNKVGRYDHKNMCRLGFKQSATRIREDARISCRESNSESILKRLDKSFFTNSSLRNLCFYSEESPTAFDSVSSDLGRLKFGLSYKEQVGGNRELYVGDLNTKLMTRLIEDYFECLMEKMKYTCLNNEAEFERALLDMKSVVRRSGFTVSMDHSKWGPHMSPVIFSQLFKALQFSLPDGSQIDKEPILNLLSWHIHKVVEVPFNVVHAYTKGYLKRLCGLMDNRTSKTEDFMDKFFADEVIPSHISSVLDMGQGILHNVSDFYGLITEQFISYALQTCVGVLSMAFTSSDDEILLGVTNDLKNQDESLDIDKSLEFLEFHNYLSATLNKFISPKTVAGTFACEFKSRFYIWSQEVPLLTKFTAAALHNVKAKAPNQLCETIDTIQDQCVANGVSVEVVGAISKRTNNIIKYSGHPSNPFLCLNDMDVKDWVDGSRGYRLQRSVENVYNDDEIPEYVRDMAARLFYLIRNGQVQEEYLISSMQSDPDECFTLLAGILGVPEQNISRLLDIRWLNLRAHGDLRMVLRTKLMGSNRVIQREEVPSLIKSVQSKLSKNFVRGARKIITDAVNKSAFQSCIAAGFVGICKSMGSKCVRDGKGGFMYIKDILSKIQYHKNCDVCKVSSGIYCKESLKAVSDFSRPLFWDYFALVLTNACELGNWVFSKPKIPDVVYKLDNPNFFWPVKPASHTELEDKIGMNHVLYSIKRNYPDIFEEHLAPYLTDLNTLKLSWVQKVKFLDICVAIDMVSESLGIISHMIKRKREELYIVKQNEQSMSHTRESQELAGGFRVTNEQICHNFLLQILFDSMITPVLLTSSQFKKYFWYGEVELLPNDCEHPLGQLTQFIMDCKKLNLSRAMNLDDLDVGFVHSTIKLSDVFLNFSTFLTKVDWENRKDYNNLEELLKSTLESQLVLSIGLTFTHLRRSLKYKYERSTVYTIIAKVILDIEQLTLNEDDQICLIVQEVECYVSQSGGDHISLDGAALIPLTPIISGTETLCLDEVAIRQDDMLKGVSKHLGNVKLDFSSHIKELKNKFSYKIQGPQVGMNPLHIDKGIIMEGDKVVSRLDVNVTAKSLFMALELLTDDELIRKFLRSLFYYLKSVKKGTALISLLSSDLKDIAEVYFNHFKDILKEEADWVSFGSFQLVYSKSLDTIMIGDEKGEFRLKGVNCKRLIPVIPAVQEIE

SEQ ID NO: 109 - protein, 510 aa, Pirital virus
  glycoprotein precursor (GPC) protein of Pirital virus(PIRV)
MGQFITLMQSIPEALNMAFNVALVIVSLLCVTKGLINLWKCGIIQLLMFLALAGRSCDGEYKIDRRHVLSHVEFNLTRMFDNLPQSCSINNTHHYYKGPENTTWGVELTLTNTSVMNRSDENVTSIRSLGFGNITNCDKTGEAGHTLKWLLNELHFTVLHVTRHIGALCRTTAGAGLLIQYNLTTSDKGGEVGRHLIASLAQIIGDNKAAWVGKCYNNCTSSGKCSLTNCEGGTHYKFLVIQNTTWPNHCSYSPMSTVRMIIQKTAYSSVSRKLLGFFTWDISDSSGQHVPGGYCLEQWAIVWAGIKCFDNSVMAKCNKDHNEEFCDTMRLFDFNQNAIKTLQLNVENSLNLMKKSINGLISDSLVIRNSLKQLAKIPYCNYTKFWYVNDTITGKHSLPQCWLVSNGSYLNETHFKNEWLWESQKLYNDMLLKEYEERQGNTPLALADLCFWSLVFFTTTVFFQLIGIPTHRHLIGEGCPKPHRLTSNSLCSCGFYKIPKKPFRWVRKGK

SEQ ID NO: 110 - protein, 560 aa, Pirital virus
  nucleoprotein of PIRV
MASDNVASFRWTQALRRGLSNWTNPVKSDVITDTRALLAALDFDRVAQVQRLMRKDKRTDTDLTKLRDLNKEVDALMNMRTTQKDNVLRVGGLSKDELMELASDLQKLKKKVLRVEGSGQPGVYAGNLTTTQLEQRSKILRDMGFAQLRGNPSGVVKVWDIKDSSLLINQFGSMPAVTMACMTEQGGESLNDVVQGLSALGLLYTVKYPNMSDLEKLADQYPCLGYITQEQSQINVSGYNLSLSAAVKAGACMLDGGNMLETIQVKPTMFSSMIKAVLEVKSKERMFVSEAPGQRNPYENLLYKLCLSGDGWPYIGSRSQVKGRAWDNTTVDLTDTGSPNHPPVRNGGSPRLSQLSHAKEEQILEGLKRLDSKATTWIDIEGTPNDPVELAIFQPESGNYIHCYREPHDVKSFKDQSKYSHGMLLKDLTNTQPGLISFIIKNLPAGIVLTAQGSDDIEKLLEMHARRDISIIDVRLTSEQARQFEDKVWDKFGILCNKHKGIVLARKKKGSPPGSKNPHCALLDCIMFCSTIGGFVDDKKPTRLLPLDLLYREQASLIEL

SEQ ID NO: 111 - protein, 95 aa, Pirital virus
  Z protein of PIRV
MGLRYSKEVRERHGDKDLEGRVPMTLNLPQGLYGRFNCKSCWFANRGLIACSDHYLCLNCLTRLRSQSQFCGICGKPLPTKIRFEESPSAPPYEP

SEQ ID NO: 112 - protein, 2210 aa, Pirital virus
  L protein of PIRV
MEEHVNELHDLVRKWVSDDENFAEQKAIFLSQTKLRAITIEGLKLLSTIVEVDSCQKNSCIHNREKTLNSILRDNKIVCPTLPEIVPDGYRLIGDVLILLEVFVRSNQESFEKKYEQDYTKLMQVKKDLQSHGITLVPMIDGRSSYYVEFMPDWVVEKIRWHLIKLMDLLKEDGESVEELEYERLVSSLSALENQSLGLESLLSIKERGIEYIDRLTKIMYGNLNNNMSVDECKGEILRIYQNFRQLFDQGQFKPKYRKTDREFILKTLREHGLIKCAIMSEEDSCKNCMIHMFKVLTIIKQSFVSNKNIESSFILKEYNQLLSVCNKVKSLKVLNTRRGTLMVLDLIMLNKLLSLIKIYGIKAALTILRMQCIPAVNDRLLSIDFLISIYERKMIKSPKWLEKVHGKLKRVVQDCMFKALEDYLVEIDFDTWFSIKDELLMTQQFKPSICYRSSKGCVCNAETLKNLSMMTEEDFLSYLKILSSLSLSLVNSMKTSSAPKSKINQANDFYGIVHCEEVYFQGFGDNNACTLLYQKTGEKSRCYSVAFSDNEQQIDYGSKISFYADPKRFFLPIMSQDVLNRMCNEMLSWLDFLSDDNIKVVADLLRKLILCVLCTPSKRVQVYLQGFRYLIMAYVNEIHCNDLFAKLEVDALTASERQVMIWMDDLTRIVLEMSKEADMAKSFKFILNLSYLCHLITKETPDRLTDQIKCFEKFLEPKLKFGSLMVNPDSTPELTSEQEDQVCEGLHRLLNKKIFSKCENIPGVSKELVSLCSSLFNSSNLEVKPLLNHDPLTPSFTSTALDLSSNKSVVVPKLNEIGETLTEYDFGKIVSSVVVDLTEHFKTKGKYKLDPRDLRFRIFKKLSSLVEVNPTKKSNRKSESGEVVAPDESFMDELTEEQQLMLSEIEVKVSKTFEGMSKDELNRKQSKEKGAEAHLKRLWSKEVRDKISSETSLHEVKDFDVQLFPFDTYEELVTIVFNDKSAHDFYFLEKYLNPCPLDMLMKNLTLKAFNEGDFFECFKYILIASEFDNKIGRYDHKIRTRLGLKDPALKIREEARISTRESNSESIAKRLDKSFFTNSSLRNLCFYSDESPTTRTGVATDVGKLKFGLSYKEQVGGNRELYVGDLNTKLITRLVEDYAESICSNMKYTCLNSESEFERALLDMKSVVRQGGFAVSMDHSKWGPHMSPAIFAQLLRCLKFRLKDGSEIDKKAVLNILYWHLHKIVEVPFNVVQAFMSGFVKRGLGLMDRGGATLSEEFMFGFFEKGVVPSHLSSVVDMGQGILHNMSDLYGLITEQFINYVLDFCYNVSMTSYTSSDDEIMLSTSSALNHEDGSLNVDVALEILEFHNFLSDKLNKFVSPKTVAGTFASEFKSRFFIWSQEVPLLTKFVAAALHNIKAKAPNQLAETVDTILDQCVANGVSIEIVGAISKRTNSLVCYSGHPLNPFLCLEESDVRDWVDGSRGYRLQRSIENIFPDDLCPNLIRDACRKVFHRIQSGKIEEEFLVASIQGSPDECLNSMLTIADVDEDIKKDLAGYRWLNLRAYGDLRLVLRTKLMSSTRTLQREEIPSLVRSVQSKLSKNFVRGAKRILTDAINKSAFQSCISSGFIGVCKSMGSKCVRDNTGGFVYIKEITKHVMPHTTSYCPYCKPSKNIYCEDALRSVSEYSRPIFWDYFSLVLSNACELGNWVFGAPILPKTVFHLDNPNHFWPIKPSSQTELEDKVGMNHVLYSIRRNYPSIFDEHISPYMSDLNMLRLSWVQKIKFLDLCVALDMSSECLGIISHIMRRKREELYIVKQQELSMSHTRESTNLESGLSLEPQEVCKNFLLQVLFDSMVNPVLLTTSQFRKYFWYGEVLQLPNDASHHLAQFTQFILDCKQLNSSRAMTLDDLDVGYVTSRVKRTTTFVALSTFITSLDWENRHEYKSFQELILSSPCDVFKFEFSMTFSHIRSSHKFRYERCTSYILKVHVVFDKRVLNSNMLEDQSLLITPHSVEYFVSQSGGNHISLDGVGLLPLDPLISGKEVLNIDDVLRHEDVNFSAESPLFSKMRFDFKPFLKELKNKFSYKLIGPDIIMEPLVLDKGQIKEGSRIVSQLKLRLDFKAVFVALGCLEEESRSTFISNLFMYIGSLRGEEHRISMTESNLVQLIDNYPQVFDSMLDATNDWLNCGSFSLCKSKSLGCVMIADERGPFKLKGVNCRRLLPDSQAVEID

SEQ ID NO: 113 - protein, 488 aa, Sabia virus
  glycoprotein precursor (GPC) protein of Sabia virus (SABV)
MGQLFSFFEEVPNIIHEAINIALIAVSLIAALKGMINLWKSGLFQLIFFLTLAGRSCSFRIGRSTELQNITFDMLKVFEDHPTSCMVNHSTYYVHENKNATWCLEVSVTDVTLLMAEHDRQVLNNLSNCVHPAVEHRSRMVGLLEWIFRALKYDFNHDPTPLCQKQTSTVNETRVQINITEGFGSHGFEDTILQRLGVLFGSRIAFSNIQDLGKKRFLLIRNSTWKNQCEMNHVNSMHLMLANAGRSSGSRRPLGIFSWTITDAVGNDMPGGYCLERWMLVTSDLKCFGNTALAKCNLDHDSEFCDMLKLFEFNKKAIETLNDNTKNKVNLLTHSINALISDNLLMKNRLKELLNTPYCNYTKFWYVNHTASGEHSLPRCWLVRNNSYLNESEFRNDWIIESDHLLSEMLNKEYIDRQGKTPLTLVDICFWSTLFFTTTLFLHLVGFPTHRHIRGEPCPLPHRLNSRGGCRCGKYPELKKPITWHKNH

SEQ ID NO: 114 - protein, 58 aa, Sabia virus
  GP signal peptide of SABV
MGQLFSFFEEVPNIIHEAINIALIAVSLIAALKGMINLWKSGLFQLIFFLTLAGRSCS

SEQ ID NO: 115 - protein, 196 aa, Sabia virus
  GP1 of SABV
FRIGRSTELQNITFDMLKVFEDHPTSCMVNHSTYYVHENKNATWCLEVSVTDVTLLMAEHDRQVLNNLSNCVHPAVEHRSRMVGLLEWIFRALKYDFNHDPTPLCQKQTSTVNETRVQINITEGFGSHGFEDTILQRLGVLFGSRIAFSNIQDLGKKRFLLIRNSTWKNQCEMNHVNSMHLMLANAGRSSGSRRPL

SEQ ID NO: 116 - protein, 234 aa, Sabia virus
  GP2 of SABV
GIFSWTITDAVGNDMPGGYCLERWMLVTSDLKCFGNTALAKCNLDHDSEFCDMLKLFEFNKKAIETLNDNTKNKVNLLTHSINALISDNLLMKNRLKELLNTPYCNYTKFWYVNHTASGEHSLPRCWLVRNNSYLNESEFRNDWIIESDHLLSEMLNKEYIDRQGKTPLTLVDICFWSTLFFTTTLFLHLVGFPTHRHIRGEPCPLPHRLNSRGGCRCGKYPELKKPITWHKNH

SEQ ID NO: 117 - protein, 562 aa, Sabia virus
  nucleoprotein of SABV
MSNSKEIPSFRWTQSLRRGLSEFTTPVKTDVLRDAKMILDGLDFNQVSLVQRILRKSKRNDGDLDKLRDLNKEVDNLMSMKSSQRDTILKLGDLNKSELMDLASDLEKLKRKVGQTERSASGGVYLGNLSQSQLTKRSDLLRKLGFQQQQVRSPGVVRIWDVADPNRLNNQFGSVPALTIACMTKQSDNTMGDVVQALTSLGLLYTVKFPNLIDLEKLTAEHDCLQIVTKDESGLNISGYNYSLSAAVKAGATLLDGGNMLETIRITPDNFSQIIKTTLSIKKKEGMFVDEKPGNRNPYENLLYKICLSGEGWPYIGSRSQIKGRSWENTTVDLSTKPQQGPRTPEKAGQNIRLSHLTELQESVVREAMGKIDPTLTTWIDIEGTSNDPVELALYQPDTGNYILCYRKPHDEKGFKNGSRHSHGMLLKDLESAQPGLLSYVIGLLPQNMVLTTQGSDDIRRLVDTHGRKDLKIVDIKLASEQARKFEEPIWSDFGHLCKKHNGVIVPKKKKDKDIPQSSEPHCALLDCLMFQSAIAGQPPQTKLEGLLPDALLFTLEAAFTI

SEQ ID NO: 118 - protein, 100 aa, Sabia virus
  Z protein of SABV
MGNSKSKSKLSANQYEQQTVNSTKQVAILKRQAEPSLYGRHNCRCCWFANTNLIKCSDHYICLKCLNIMLGKSSFCDICGEELPTSIVVPIEPSAPPPED

SEQ ID NO: 119 - protein, 2212 aa, Sabia virus
  L protein of SABV
MQDPLLGTLSELKDLVRKTIPDVIELAYQKDALLSQVHPRSVLIEGFKLLSLLVELESCKVNACHHNYEQKFIDVILSDGGILCPTLPKVVPDGYNLMGKTLILLETFVRVNPDDFEKKWKADMSKLISLKTDLGKIGVTLVPVVDGRSNYNTSFVSDWTTERLRWLLIEVLKGMKTTSELEIEEQEYHRLIHSLAKTNNQSLGFENLECLKRNMLSYDQLLDSSLLVGVKNDVKESKVMEELIRLKIWYKSEVYEKGLGKFVKTDKKVLLSQLITLGSHEENDSLDCAFCSSRILELCFKLSVKMHEDVLTRGLNLDGTKTLHSSVQSYLNVLSMCNKIKGSKIFNTRRNTLLFLDLIMLNFVVDEMVKDSTVIRNLKNAGLIVGQMILLVNDRVLDILTANKLIRQKLTTNEKWLSICSSVLKRYDLELWEKLCYLIRVPDFNELFQLAKELVSDRPMMRYSVHKAEERQCCHKAMENFTDDDFKIMLKALSHLSLGLINSMKTSFSSRLLINERDYSRYFGNVRLRECYIQRFPITNNIIGLLFYQKTGERSRCYSLYIAENGELTEIGSFYCDPKRYFVPIFSEAVITSMCEEMINWLNFDSELVRIVSTQLKTLMLLLLCSPSKRNQTFLQGLRYFIMAYVNQAHHIDLMSKLAVECKSSSEIQLQRLCVRLFVSILSGDNEIEYGFTRRFKFLLNISYLCHFITKETPDRLTDQIKCFEKFLEPKLKFNSVIVNPSLNGTLTESQEHQMISSIDRFFSKELLDQSDVKEPGVSRELLGYCVSLFNRGKLRVSGDLKVDPFRPTFTSTALDISSNKSVVVPKLDELGNIVDKYNKQLMVSSCVTSLVEMFKTKGRYNLDPDSIDFLVLKNLTNLVSANVPQEKSQEELSTLYEALTEDQISAFEQVRDEVQLALHKMKSSDAREERLQDPKRNEKNASKGKILESLWSPHQVNRAIKNETSIHEIKDFDPDILDSHLVEKLCHEVYNSSQKSLFFLDEPLKSVPLEMLLINLTTIAYEEEEFFECFKYLLIQGDFDQKLGTYEHKSRSRLGLSSEALKVQENARVSTRESNAEAIAKKLDRTFFTSAALRNLCFYSEDSPTEFTSVSTNTGNLKFGLSYKEQVGSNRELYVGDLNTKLMTRLVEDFSEVVTGSMRFSCLNSEKEFERAICDMKMAVNNGDFSLSMDHSKWGPHMSPALFFTFLANLNLTEPKSRTRLNLDPLLNILKWHLHKTVEVPFNVAQAYCIGKLKRSLGLMECQCSSLTEEFYHSYLQIQDEIPSHIMSVLDMGQGILHNLSDLYALITEQFLNYVIHKLFDIDVTSYTSSDDQISIMKLPLSTKENDEDFDWLEIICFHEYLSSKLNKFVSPKSVVGNFVAEFKSRFFVMGEETPLLTKFVAAALHNVKCKTPTQLAETIDTICDQCVANGVGVDIVSRISERVNRLISYSGYKETPFLTIVNQDVKDWTDGSRGYRLQRNIENSFGNQELLRLIRRGARKVFLEIKKGHVFEENLIGLIGRGGDEALRGFLLYAGFAENDIVEALRHKWLNPSTFGDLRLVLRTKIMSSKRILERESVPSLIKTLQSRMSKNFIKGAKKILAESINKSAFQSSVASGFIGFCKSMGSKCVRDGKGGFMYLKELYNNVNKCGCCICLEWPGVVYCQDSLAKISQFARSILWDYFTLVLTNACEIGEWVFSDVKSPSAPPILSNPNLFWAVKPKIQKHIEDRLSLNHILHSIKRNYPYLFEEHLAPFMSDLQFNQMMNPSHVKFLDVCIALDMMNENLGIIGHLLRGRNHFIYIVKQSECASAHIRQSDYVDHELGLSPQQVCYNFKVQFLFSSMIDPLIVSTSTLKTFFWFNEVLSIEEEDQIDLGELTDFTLFIKTGHLNRAMTADDITMGYVCSNLAEEIITLNSYGSFQEFRSNHPSKNDLSDILKTLTSESIKLTLDIQIVHMRNSTKYNISRKIVYTLKALCALPLEDCFTKDPVALVESLELFASGVNGGHLQLDGVTMVSVLPLLRGKKAVNLAQILMDNDLAATNDHNVMESVTLDFTKFHDELGDKFCYSLVGPEDQGNPIVLHNGMFMIDNQKLSYLKVEIFGDTIIKALGALDSPREIGSLLHGLWPYLKATKQIINFDQTDFEMIYDLHRVVLLESIAQFGDWVEFASFKVAFSKHYKDIVVADNLGNLRLKGVTCRLFRQQQSVEDIE

SEQ ID NO: 120 - protein, 495 aa, Tacaribe virus
  glycoprotein precursor (GPC) protein of Tacaribe virus(TCRV)
MGQFISFMQEIPIFLQEALNIALVAVSLICIVKGLVNLYRCGLFQLMVFLVLAGRSCSEETFKIGMHTKFQEVSLSLSALLTNQSHELPMLCLANKTHLYLKSGRSSFKINIDSVTVLTRSEVNLTSINLTRSIDVFVHSPKLGSCFESDEEWVVAWWIEAIGHRWDQDPGLLCRNKTKTEGKLIQINISRADGNVHYGWRLKNGLDHIYRGREEPCFEGEQCLIKIQPEDWPTDCKADHTNTFRFLSRSQKSIAVGRTLKAFFSWSLTDPLGNEAPGGYCLEKWMLVASELKCFGNTAIAKCNQNHDSEFCDMLRLFDYNKNAIKTLNEETKTRVNVLSHTINALISDNLLMKNKIRELMSVPYCNYTRFWYVNHTLSGQHSLPRCWMIRNNSYLNSSEFRNEWILESDFLISEMLGKEYSERQGRTPITLVDICFWSTVFFTSTLFLHLIGFPTHEHIRGEGCPLPHRLNSMGGCRCGKYLPLKKPTIWHRRH

SEQ ID NO: 121 - protein, 58 aa, Tacaribe virus
  GP signal peptide of TCRV
MGQFISFMQEIPIFLQEALNIALVAVSLICIVKGLVNLYRCGLFQLMVFLVLAGRSCS

SEQ ID NO: 122 - protein, 203 aa, Tacaribe virus
  GP1 of TCRV
EETFKIGMHTKFQEVSLSLSALLTNQSHELPMLCLANKTHLYLKSGRSSFKINIDSVTVLTRSEVNLTSINLTRSIDVFVHSPKLGSCFESDEEWVVAWWIEAIGHRWDQDPGLLCRNKTKTEGKLIQINISRADGNVHYGWRLKNGLDHIYRGREEPCFEGEQCLIKIQPEDWPTDCKADHTNTFRFLSRSQKSIAVGRTLK

SEQ ID NO: 123 - protein, 234 aa, Tacaribe virus
  GP2 of TCRV
AFFSWSLTDPLGNEAPGGYCLEKWMLVASELKCFGNTAIAKCNQNHDSEFCDMLRLFDYNKNAIKTLNEETKTRVNVLSHTINALISDNLLMKNKIRELMSVPYCNYTRFWYVNHTLSGQHSLPRCWMIRNNSYLNSSEFRNEWILESDFLISEMLGKEYSERQGRTPITLVDICFWSTVFFTSTLFLHLIGFPTHEHIRGEGCPLPHRLNSMGGCRCGKYLPLKKPTIWHRRH

SEQ ID NO: 124 - protein, 570 aa, Tacaribe virus
  nucleoprotein of TCRV
MAQSKEVPSFRWTQSLRKGLSQFTQTVKSDILKDAKLIADSIDFNQVAQVQRVLRKTKRTDDDLNKLRDLNIEVDRLMSMKSVQKNTIFKVGDLARDELMELASDLEKLKDKIKRTESNGTNAYMGNLPQSQLNRRSEILRTLGFAQQGGRPNGIVRVWDVKDSSKLNNQFGSMPALTIACMTVQGGETMNNVVQALTSLGLLYTVKYPNLSDLDKLIPNHECLQIITKEESSINISGYNLSLLAAVKAGASILDGGNMLETIRVSPDNFSSLIKNTLQVKRREGMFIDDRPGSRNPYENLLYKLCLSGDGWPYIGSRSQIMGRSWDNTSVDLTKKPDAVPEPGAAPRPAERKGQNLRLASLTEGQELIVRAAISELDPSNTIWLDIEDLQLDPVELALYQPAKKQYIHCFRKPHDEKGFKNGSRHSHGILMKDIEDAVPGVLSYVIGLLPPNMVITTQGSDDIRKLLDIHGRKDLKLIDVKFTSDQARLFEHQVWDKFGHLCKQHNGVIISKKNKSKDSPPSPSPDEPHCALLDCIMFHSAVSGELPKEEPIPLLPKEFLFFPKTAFAL

SEQ ID NO: 125 - protein, 95 aa, Tacaribe virus
  Z protein of TCRV
MGNCNRTQKPSSSSNNLEKPPQAAEFRRTAEPSLYGRYNCKCCWFADKNLITCSDHYLCLRCHQIMLRNSELCNICWKPLPTSIRVPLEASAPDL

SEQ ID NO: 126 - protein, 2210 aa, Tacaribe virus
  L protein of TCRV
MDETVSELKDLVRKHIPNRHEFAHQKDAFLSHCHSGSLLQEGFKLLSNLVELESCESHACHLNTCQKYVDVILSDHGIPCPTLPKVIPDGFKLTGKTLILLETFVRVNPEEFERKWKSDMTKLLNLKQDLLRSGITLVPVVDGRTNYSNRFTPEWVVERIRWLLIEILRKSRSSAEIDIEDQEYQRLIHSLSNVRNQSLGFENIECLKRNLLEYDDRLAKSLFVGVKGDVRESVIREELMKLRLWYKKEVFDKNLGKFRITNRSELLNNLIRLGKHEDNTTSDCPFCVNKFMDIIYSLTFTALKRQDREKSNSELDQYVVCPHEKAYLGVLSICNKIKGLKVFNTRRNTLLFLDLIMVNFLDDLFTAKPEALDSLRRSGLILGQMVTLVNDRALDFLEAVKLIKKKIETNVKWVENCSKILRRSQQDIWSQISVWARYPDLSKLISIAQTISSDRPIMRYSAGGNFNTECKHKTFHMMSDAEQVEAFKILSSVSLSLINSMKTSFSSRLLINEKEYSRYFGNVRLRECYQQRFFLTDGLIVILFYQKTGERSGCYSIYTCEDGVLVEKGSFYCDPKRFFLPIFSQEVLVEMCDEMTTWLDFNSDLMVISKEKLRLLLLSILCAPSKRNQVFLQGLRYFLMAYSNQFHHVDLLSKLKVECMSGSEVIVQRLAVDLFQCLLGEGVDSDPYFARRFKYLLNVSYLCHLITKETPDRLTDQIKCFEKFIEPKIDFNCVIVNPSLNGQLTEAQEGMMLDGLDKFYSKTLKDCSDTKLPGVSNELLSYCISLFNKGKLKVTGELKNDPFKPNITSTALDLSSNKSVVVPKLDELGNVLSVYDREKMISSCVSSMAERFKTKGRYNIDPSTLDYLILKNLTGLVSIGSKTQRDCEELSMMFEGLTEEQAEAFNDIKNSVQLAMVKMKDSKSGDVNLSPNQKEGRVKSSTGTLEELWGPFGIMREIRTEVSLHEVKDFDPDVLASDLYKELCDVVYYSSSKPEYFLERPLEVCPLGLLLKNLTTSAYFDEEYFECFKYLLIQGHYDQKLGSYEHRSRSRLGFTNEALRVKDEVRLSMRESNSEAIADKLDRSYFTNAALRNLCFYSDDSPTEFTSISSNNGNLKFGLSYKEQVGSNRELYVGDLNTKLITRLVEDFAEAVGSSMRYTCLSSEKEFDRAICDMKLAVNNGDLSCSLDHSKWGPTMSPALFLTFLQFLELRTPKERNIINLEPVLNVLRWHLHKVIEVPVNVAEAYCTGNLKRSLGLMGCGSSSVGEEFFHQFMPVQGEIPSHIMSVLDMGQGILHNMSDLYGLITEQFLNYVLDLLYDVIPTSYTSSDDQVTLIKLPCASDDNQVNDEWLEMLCFHEYLSSKLNKFVSPKSVAGTFVAEFKSRFFVMGEETPLLTQFVAAALHNVKCKTPTQLSETIDTICDQCVANGVSVQIVSKISQRVNQLIKYSGFKETPFGAVEKQDVKDWVDGTRGYRLQRKIESIFSDDEMTGFIRSCAKRVFNDIKRGKVFEENLISLIGRDGDDALVGFLRYSSCSEQDIMRALGFRWVNLSSFGDLRLVLRTKLMTSRRVLEREEVPTLIKTLQSRLSRNFTKGVKKILAESINKSAFQSSVASGFIGFCKSIGSKCVRDGEGGFLYIKDIYTKVKPCLCEVCNMKRGVIYCRPSLEKIEKFSKPILWDYFSLVLTNACEIGEWVFSSVKEPQIPVVLSNRNLFWAVKPRIVRQLEDQLGMNHVLYSIRKNYPKLFDEHLSPFMSDLQVNRTLDGRKLKFLDVCIALDLMNENLGIVSHLLKARDNSVYIVKQSDCAMAHVRQSDYVDKEVGLSPQQVCYNFMVQIILSSMVNPLVMSTSCLKSFFWFNEVLELEDDGQIELGELTDFTFLVRDQKISRAMFIEDIAMGYVISNLEDVRLYIDKITIGEQPLAPGRHINDLLDLLGNFDDHEDCDLRFLIQVEHSRTSTKYRFKRKMTYSFSVTCVSKVIDLKEASVELQVVDVTQSVSGSGGSHLLLDGVSMIAGLPIFTGQGTFNMASLMMDADLVETNDNLILTDVRFSFGGFLSELSDKYAYTLNGPVDQGEPLVLRDGHFFMGTEKVSTYRVELTGDIIVKAIGALDDPEDVNALLNQLWPYLKSTAQVMLFQQEDFVLVYDLHRSGLIRSLELIGDWVEFVNFKVAYSKSLKDLVVSDNQGSLRLRGIMCRPLARRNTVEDIE

SEQ ID NO: 127 - protein, 483 aa, Bear Canyon virus
  glycoprotein precursor(GPC) protein in Bear Canyon virus(BCNV)
MGQLVSFIGEIPAIVHEALNVALIAVSIIAIMKGLINIWKSGLFQLIMFLILAGRSCSISIGHHLELQHFIINSTSLLPSMPTLCRINATNSLIRGPFSAQWGLDIFIGDLTILVNPEPGSKTKRMTATNITGCFPNNEDPDSVAQVLSWFFRGVHHDFHLDPTILCDESVTVFRIQMNLTERMYCDRIVSKLARLFGSFGDYCSKVGKKLVIIRNVTWSNQCHEDHVGSMQLILQNAHNQVMRFRKLQNFFSWSLVDSAGNSMPGGYCLEKWMLVASELKCFGNTAVAKCNINHDSEFCDMLRLFDYNKKAIVNLQDKTKAQLDSLIDAVNSLISDNLITKNKIRELMNIPYCNYTKFWYVNHTGLNVHSLPKCWHVRNGSYLNESDFRNEWIIESDHLVSEILAKEYEERQKRTPLSLVDLCFWSTLFYTASIFLHLLHIPTHRHIIGEGCPKPHRLTSDSLCACGFFQLKGRPTRWARIP

SEQ ID NO: 128 - protein, 58 aa, Bear Canyon virus
  GP signal peptide in BCNV
MGQLVSFIGEIPAIVHEALNVALIAVSIIAIMKGLINIWKSGLFQLIMFLILAGRSCS

SEQ ID NO: 129 - protein, 191 aa, Bear Canyon virus
  GP1 protein in BCNV
ISIGHHLELQHFIINSTSLLPSMPTLCRINATNSLIRGPFSAQWGLDIFIGDLTILVNPEPGSKTKRMTATNITGCFPNNEDPDSVAQVLSWFFRGVHHDFHLDPTILCDESVTVFRIQMNLTERMYCDRIVSKLARLFGSFGDYCSKVGKKLVIIRNVTWSNQCHEDHVGSMQLILQNAHNQVMRFRKLQ

SEQ ID NO: 130 - protein, 234 aa, Bear Canyon virus
  GP2 protein in BCNV
NFFSWSLVDSAGNSMPGGYCLEKWMLVASELKCFGNTAVAKCNINHDSEFCDMLRLFDYNKKAIVNLQDKTKAQLDSLIDAVNSLISDNLITKNKIRELMNIPYCNYTKFWYVNHTGLNVHSLPKCWHVRNGSYLNESDFRNEWIIESDHLVSEILAKEYEERQKRTPLSLVDLCFWSTLFYTASIFLHLLHIPTHRHIIGEGCPKPHRLTSDSLCACGFFQLKGRPTRWARIP

SEQ ID NO: 131 - protein, 562 aa, Bear Canyon virus
  NP protein in BCNV
MSDQVVHSFRWTQSLRRGLSNWTCPVKADVLNDTRALLSGLDFAKVASVQRMMRRDKRDESDLTSLRDLNKEVDSLMTMKSTQKNMFLKVGSLSKGELMELSGDLNKLKDKVQRTERPPGSGGQYQGNLTTTQLTRRGELLQFIGIQKAGRVGMNGVVKVWDVKDSSLMINQFGSMPALTISCMAEQGGETLNDVVQGLTDLGLLYTAKYPNLNDLEALSEKHPCLKVITQEESQINISGYNLSLSAAVKAGACLIDGGNMLETIKIDTSTFTTVIKTLLEVKARERMFVSSVPGQRNPYENILYKLCLSGEGWPYIASRSQIKGRAWDNTVVEFDSAPPRAPVPVRNGGAPLLGPLRPELEDQVRKGVEGLSPNLTTWIDIEGPPNDPVELAIYQPETQKYLHCYRRPNDIKSFKDQSKYCHGILLKDVENARPGLISTIIRYLPKSMVFTAQGEDDIKRLFDMHGRQDLKIVDVKLSAEQSRVFEELVWKKFEHLCDRHKGIVIKSKKKGSKPASTNAHCALMDCIMFNAVLVGFVADEKPKRLLPIDILFREPDTTVVL

SEQ ID NO: 132 - protein, 95 aa, Bear Canyon virus
  Z protein in BCNV
MGLRYSREVKQRYGEKELEGRIPITLDMPQTLYGRYNCKSCWFANKGLIKCSNHYLCLKCLTAMLSRSDYCGICGGILPKKLVFETTPSAPPYTP

SEQ ID NO: 133 - protein, 2216 aa, Bear Canyon virus
  L protein in BCNV
MSEYLDELKELIRKWIPDEEMYIEQKTSFLSQVNLRSVVIEGLKLLSIIIEIDSCKKHGCVHNKNKTVNQILRDHRIVGPTLPDVVPDGYRVIGSTIILLEAFVRVSHESFEIKYKSDFEKLMQLSKDLSRCGLTLIPVVDGRSNYYTEHFPDWTIERMRWLILKITNFLRDNGEEIEELEYSRLVYSLSNMENKNLGLESLKILKEEGLDYKAKLMSVMRDGVNSNMSASECRVEMAKIYDQFSFLRKNGLYKDVYCKTSRTEIINWLKDHKLILLSGETRTAMLDERQCGYCRNHMFRILASLIKNKRHYQSLTNPKKCGSIQSHKKLLSDCNKIKGLKVLNTRRFTLLCLDVIILNSLLELIDAGEIDNEFLVNNHFKSVNDRLVSIDLIIDRLNKKLMSKPNWIGSVKYKMKRTLEIHGLYYVSKWLKQVDIDSWYEFKMMREHSDKCVKPTLKYKKDAARKCGQPEFGSSTILDDEVFLEYLEALSTLSLGLVNSMKTSSAAKFLINDKSNYFGTVQCNECYFQDLDKSYNSLLIYQKTGERSRCYGLMFKSEQFENVYEVGESFYADPKRFFLPIMSSEVILKMCVEMLSWLDWLSEQELKAFKSKLYTLIINILTVPSKRVQVYLQGFRYLIMAFVNELHFKELQNKLKVQPLTISECYVFTLMDDLVHLLLTEAQEENMSKVFRFVLNLSYLCHLVTKETPDRLTDQIKCFEKFLEPKVDFNSVFVNLDSSPHLSGEVEEKFIKDLNRLFSKDLGVEDLKDPGISKELISLCASCFNCGLLPMSKVLKHDPQSPSFTSTALDISSNKSVVVPKLDEVGETVTQYDYQSLLSSTVVDMAQSFKDKLKYKLDRKSIQFAIFKRLTNMVLKRKTDHDVKDDLDDELSEIVDDDTLRVINDVEANVSECLSKMGKISRAATVGGQNNLGRFEKIDTLKRLWDRESMNFILMETSLHEVKDFDPSIFPIEKYKSMCELVYDSKMKSEFFTDEVLKFCPLDLLVKNLATKCYLEEDFFECFKYILISAGFDNRVGRYDHRSRSRLGFKDEAILIKENSRISSRESNSEAISRRLDKSFFTNSSLRNLCFYSEESPTYRSTVSSSVGKLKFGLSYKEQVGSNRELYVGDLNTKLTSRLIEDYFESLTSECKFSCLNNDAEFERALLDMKCVVRLSGLAVSMDHSKWGPYMSPAIFNILFSNLNLELNDGVFIDKAPIENLLNWHLHKIVEVPYNVIDAYLKGYTKRRLGLMDRSSTSITEDFIFNWFAKGVVPSHISSVLDMGQGILHNTSDYYGLLTEQFILQCLDFIFDIKSTAYTSSDDEILLSNSPSLKKVDEDSLDINKCQEVLEFHNYLSSKFNKFVSPKTVAGSFASEFKSRFFIWSQEVPLLTKFVAAALHNVKAKSPHQLAETVDTILDQCIANGVSIEVVKAISRRTNKLITYSGHPKNPFLCVENTDLKDWVDGSRGYRLQRSVESLFNDDDLPLTIRNSCRSLFHRIRSGDIQEEFLINALQTSPDECLAKMLRLSDVDESTIDKVLEFRWLNLRAHGDLRLVLRTKVMSGTRILDREEVPSLVKSVQSKLSKNFVRGAKKIITDAINKSAFQSSICSGFIGFCKSMGSKCVRDGNGSFQYIKHFLKSIILHSHCEVCKPEMSVFCRAALEELKPFSRPIFWDYFSLTFSNACELGNWVFSNVTIPKRTPTTVNPNFFWPVKPGSHTELEDKVNMNHVLYSIKRNFPDLFDEHIAPFLSDLNSLKISWIQRIKFLDLCVAMDMSSECLGIISHIMRRKREELYIVKQNELSVAHMRDSSPMEAGYQLNSSEICHNFLCQLVFESMLHPVLLTTGQFKKYFWFGEVELLPNEADHDLGQLTQFVMDCKTLNISRCMSLDDLDVGYVHSSILMGDIYVNFSSFLHLLDWENRRNYKTFDEIILCSREDTIPMEIDFTISHSRKSFKFKYERKTNYHIKSKVLVQKVDIEEAQNQGFDILELEVHEIECFVSGSQGNHISLDGVGLIPLHPLFSGKEFLDVNKLLIKQDENFESTHSVFSKVKLNFSNHTKDLKNKYSYKLQGPEYNMNPLHLYRGQIMENNFVISRLDVQITSRSVFLALEALESEDRIPFLISLHIYTRSNNKKENSCFIRMTQSDLCLLIDSYEKEFTEVLKSLSDWMDFGDFALCFSNNLNCIMIADPDGQFKLKGRQCRKVSSASAPLEID

SEQ ID NO: 134 - protein, 480 aa, Whitewater Arroyo virus
  glycoprotein precursor(GPC) protein of Whitewater Arroyo virus(WWAV)
MGQLISFFGEIPSIIHEALNIALIAVSIISILKGVINIWGSGLLQFIVFLLLAGRSCSYKIGHHVELQHIILNASYITPYVPMPCMINDTHFLLRGPFEASWAIKLEITDVTTLVVDTDNVANPTNISKCFANNQDERLLGFTMEWFLSGLEHDHHFTPQIICGNVSKGEVNAQVNITMEDHCSQVFLKMRRIFGVFKNPCTSHGKQNVLISVSNWTNQCSGNHLSSMHLIVQNAYKQMIKSRTLKSFFAWSLSDATGTDMPGGYCLEKWMLISSELKCFGNTAIAKCNLDHSSEFCDMLKLFEFNRNAIKTLQNDSKHQLDMIITAVNSLISDNTLMKNRLKELINIPYCNYTKFWYVNHTGFNVHSLPRCWLTKNGSYLNVSDFRNQWLLESDHLISEILSREYEARQGKTPLGLVDVCFWSTLFYVSSIFLHLLRIPTHRHIIGEGCPKPHRLSSNSVCACGLFKQKGRPLRWAGKV

SEQ ID NO: 135 - protein, 58 aa, Whitewater Arroyo virus
  the glycoprotein signal peptide of WWAV
MGQLISFFGEIPSIIHEALNIALIAVSIISILKGVINIWGSGLLQFIVFLLLAGRSCS

SEQ ID NO: 136 - protein, 188 aa, Whitewater Arroyo virus
  the GP1 of WWAV
YKIGHHVELQHIILNASYITPYVPMPCMINDTHFLLRGPFEASWAIKLEITDVTTLVVDTDNVANPTNISKCFANNQDERLLGFTMEWFLSGLEHDHHFTPQIICGNVSKGEVNAQVNITMEDHCSQVFLKMRRIFGVFKNPCTSHGKQNVLISVSNWTNQCSGNHLSSMHLIVQNAYKQMIKSRTLK

SEQ ID NO: 137 - protein, 234 aa, Whitewater Arroyo virus
  GP2 of WWAV
SFFAWSLSDATGTDMPGGYCLEKWMLISSELKCFGNTAIAKCNLDHSSEFCDMLKLFEFNRNAIKTLQNDSKHQLDMIITAVNSLISDNTLMKNRLKELINIPYCNYTKFWYVNHTGFNVHSLPRCWLTKNGSYLNVSDFRNQWLLESDHLISEILSREYEARQGKTPLGLVDVCFWSTLFYVSSIFLHLLRIPTHRHIIGEGCPKPHRLSSNSVCACGLFKQKGRPLRWAGKV

SEQ ID NO: 138 - protein, 562 aa, Whitewater Arroyo virus
  nucleoprotein of WWAV
MSDQSVPSFRWTQSLRRGLSAWTTSVKADVLNDTRALLSGLDFAKVASVQRMMRRVKRDDSDLVGLRDLNKEVDSLMIMKSNQKNMFLKVGSLSKDELMELSSDLEKLKQKVQRTERVGNGTGQYQGNLSNTQLTRRSEILQLVGIQRAGLAPTGGVVKIWDIKDPSLLVNQFGSVPAVTISCMTEQGGESLNDVVQGLTDLGLLYTAKYPNLNDLKALTTKHPSLNIITQEESQINISGYNLSLSAAVKAGACLIDGGNMLETIKIEESTFTTVIKTLLEVKNKEKMFVSPTPGQRNPYENVLYKLCLSGDGWPYIASRSQIKGRAWDNTVVEFDTATVKEPIPIRNGGAPLLTTLKPEIENQVKRSVESLLINDTTWIDIEGPPNDPVEFAIYQPESQRYIHCYRRPNDIKSFKDQSKYCHGILLKDVENARPGLISSIIRSLPKSMVFTAQGADDIRKLFDMHGRQDLKIVDVKLSAEESRIFEDLVWKRFEHLCDKHKGIVIKSKKKGSTPATTNAHCALLDGVMFSAVISGSVSNEKPKRMLPIDLLFREPETTVVL

SEQ ID NO: 139 - protein, 95 aa, Whitewater Arroyo virus
  the Z protein of WWAV
MGLRYSKEVRDRYGDKEPEGRIPITLNMPQTLYGRYNCKSCWFANKGLLKCSNHYLCLKCLTLMLGRSDYCGICGEVLPKKLVFENSPSAPPYEA

SEQ ID NO: 140 - protein, 2219 aa, Whitewater Arroyo virus
  the L protein of WWAV
MIDCSDRINELKDLVRRWVPDEEAYTEQKTIVLSQVNPSSVITEGLKLLSMLIEIDSCLKHGCVFNKNKTVNQILKDHKIVGPTLPDVVPDGFKVSGSTIILLETFVRVNQESFEQKYKYDFEKLMQLSKDLNKCGLILVPVIDGRSNYYVDRFPDWVIERIRWLLLKLMDSVKDSGESIEELEYNRLISSLSNMENQNLGLESLKALREEGLDYKAKLMGVIKDGTMSKMTASECRIGIAKIYDQFCLLRDSGQYQDVYCETSRADMIKWLKTHKLISPISNGEGGPLNSERCGFCQNHMLRVIAELVQSKRASCTQLPAESKETLRHKKLLSDCNKVKGLKVLNTRRHAILCLDVIVLNSLIEVIKSGVDSSHFLINNHYKSVNDRLLSVDLIINKLERKLLKQPDWLKIVGRKLNKSVKEQSLDYVTVWLKELDYEFWYEFKFEREHSGKCEKPTLRYKKQNQDTCYQVKFGTDKVLNEGMFVDYLDALSSLSLSMMNSMKTSSAPKLIINDEKNFYGTIQCEECYYQDLDNLYNSILLYQKTGEKSRCYGLMLKDEEMTNAYKTGPSFYADPKRFFLPIMSSTVILKTCLEMLSWLDWLSTAEINDVKTKLFTLVVNILITPSKRVQIYLQGFRYFIMAFVNEFHFKKLDQKLSVQALTSAEQHVFVLMDELVVYLLEEALEENMAKIFKFVLNLSYLCHFITKETPDRLTDQIKCFEKFLEPKIQFGSSFVNLDSSPNLCKEDEEKFIMNLNKLFSKDLGVDDMENPGICKTILSLCVSCFNCGILPINKVLDRDPQSPSFSSTALDISSNKSVVVPKLDEAGEVITHYDYQSLLSSVVVEMAQSFKDKLRFKLDRKSIQFAIYKRLTNMVLKRRSHPKDHDDECAEEFEELLDEGTYKLINDIESNVLECLNGMVTSPMKKDVKEQGAVRRYEGSDLLSTLWPRELMGPILAETSLHEVKDFDPSIFSDGTYQDLCHSVFNSKFKKHFFLDDVLRFCPLESLVKNLATKNYIEKDYFECFKYILISAGFDNRVGRYDHRSRSRLGFKDAAYHVKEASRISLRESNSEAISKRLDKSFFTNSSLRNLCFYSEESPTFQSTVSSSTGKLKFGLSYKEQVGSNRELYVGDLNTKLTSRLIEDYFESITSESKFSCLNNELEFEKAILDMKSVVRLSGLAVSMDHSKWGPYMSPAIFNALFSNLDLQLKDGTSIDKGPIENLLNWHLHKLVEVPYNVIEAYLKGYTKRGLGLMDRMSNTICENFIFNWFARGVVPSHISSVLDMGQGILHNTSDYYGLVTEQFIMLCLEQCFDVKMSAYTSSDDEIILSNSFSLRNSDNESLNNLKCKELLEFHYYLSSKLNKFVSPKTVAGSFASEFKSRFFIWSQEVPLLTKFVAAALHNVKAKSPHQLAETIDTILDQCVANGVSIEIVKEISKRTNRLIKYSGHPIDPFLCVVDTDLKDWVDGSRGYRLQRSIESAIGDDTQLSIIRNSCKKLFFKIRSGNIQEEYLISALQSSPDECLRQMLSITEVNEQEIEDLVETRWLNLRTFGDLRLVLRTKIMSGTRILDREEIPSLIKSVQSKLSKNFVRGAKKIVTDAINKSAFQSSICSGFIGLCKSMGSKCVRDGTGGFVYIKMLLREIKDHQACGICKPKLSVFCKSALDRLPKYSRSLLWDYYSLVFTNACELGNWVFSEAMLPKRVPTMVNPNFFWCVKPGSHTELEDKVNMNHVLYSIKRNFPDLFDEHIAPFLSDLASLKISWVQRIKFLDLCVAMDMSSECLGVISHIMRRKREESYIVKQNELSHAHVRDSNPLEGGFQLNSLEICRNFLYQIIFESMLHPVLLTTSQFKKYFWYGEVELLPNDADHDLGQLTQFIMDCKTLNISRCMSLDDLDVGYVHSKITLSDIFINLSSFMHLLDWGSLNDYESFDDIILKTGQKQTPIEIGIVLSHIRRSFKFKYDRKTNYHIECRLIIDKDEMMMNRWDEDNILEIEVSEVQCFVSGSEGHHISLDGVGLIPLHPLFSGKELIDFNKLLVDQSVEFRQTSTVFQRVRLDFRQHTKDLRNKFSYKFQGPEQGLSPLHLYKGQIMERNTIVSRLDVPISSKSVFLALEALDPAEHTTFLTSLHTYMKTRMSKSNPCFIRMTQEDLCLLIESYEAAFIGVLKLESDWIEFGDFALCFSNSLNCIMIADDGGQFKLKGRKCRSASTCPRPLEIE
